United States Patent Application Publication US 2022/0267853 A1 - sequence listing, part 5

SEQ ID NO: 505 - DNA, 4090 bp, Homo sapiens
gagacctgaatgaaatgagggagccttgggagcatgatccaggcggagggaactggattcgggaggaggaactgccttggccttgaaagatacctaccaggagttcaagtgctgtgcgggtgcatcagctttgtagatttgtgcaagatgaaaattggaattgtcttaggaaattatggatcattcatttattcagtgctggattcattcagtgatttatgtctgaagtgtgacagaaggggagtaaggccaagtgtccttgccctctattggagattctgcctcccctgggacagatggcttcttgagcacactcccacgatgggtggctgctctggtacatctcatccacttcttcatctgtgaagctgtcacccatggtggtgagcagctcctggaggtggtcctcatgaatgaaacctgaggattcctcgttgaagcaggtattcatccatggggttcttccgcggtgaagccagcttgtcgtgctgtcccccttgtcattgaagccatcatggttctggtcaatcatgttgaaagcctccttaaactcctggatgtggaactggtcgaacatcacgaagacattggatgtggccccttgtgctgtggtcgcttcttggtggtcttggctttggtccacttgctgaacattttggcttcaggaagcagtaccttgaagagaaattggagagggagtcaattcctaggatagcagagagatggacaacagacagaatggaggttcctttctgtgcacgtcagaagatgacaggcaagaaaacaaagtggaaaacaataaggaagtgaaggtcaccccagctctgatctttgccatcacagttgctacaatcggctctttccagtttggctacaacactggggtcatcaatgctcctgagacgatcataaaggaatttatcaataaaactttgacggacaaggcaaatgcccctccctctgaggtgctgctcacgaatctctggtccttgtctgtggccatattttccgtcgggggtatgatcggctccttttccgtcggactctttgttaaccgctttggcaggcgcaattcaatgctgattgtcaacctgttggctgccactggtggctgccttatgggactgtgtaaaatagctgagtcagttgaaatgctgatcctgggccgcttggttattggcctcttctgcggactctgcacaggttttgtgcccatgtacattggagagatctcgcctactgccctgaggggtgcctttggcactctcaaccagctgggcatagttattggaattctggtggcccagatctttggtctggaactcatccttgggtctgaagagctatggccggtgctattaggctttaccatccttccagctatcctgcaaagtgcagcccttccatgttgccctgaaagtcccagatttttgctcattaacagaaaaaaagaggagaatgctacgcggatcctccagcggttgtggggcacccaggatgtatcccaagacatccaggagatgaaagatgagagtgcaaggatgtcacaagaaaagcaagtcaccgtgctggagctctttagagtgtccagctaccgacagcccatcatcatttccattgtgctccagctctctcagcagctctctgggatcaatgctgtgttctattactcaacaggaatcttcaaggatgcaggtgttcaacagcccatctatgccaccatcagcgcgggtgtggttaatactatcttcactttactttctctatttctggtggaaagggcaggaagaaggactctgcatatgataggccttggagggatggctttttgttccacgctcatgactgtttctttgttattaaagaatcactataatgggatgagctttgtctgtattggggctatcttggtctttgtggcctgttttgaaattggaccaggccccattccctggtttattgtggccgaactcttcagccagggcccccgcccagctgcgatggcagtggccggctgctccaactggacctccaacttcctagtcggattgctcttcccctctgctgcttactatttaggagcctacgtttttattatcttcaccggcttcctcattaccttcttggcctttaccttcttcaaagtccctgagacccgtggcaggacttttgaggatatcacacgggcctttgaagggcaggcacacggtgcagatagatctgggaaggacggcgtcatggggatgaacagcatcgagcctgctaaggagaccaccaccaatgtctaagtcatgcctccttccacctccctcccggcatgggaaagccacctctccctcaacaagggagagactttatcaggatgaacccaggactgcttctgaatgctgctacttgatttctttctcatcccacgcactccatgagcaccccaaggctgcagtttgttggatcttcaatggctttttaaattttatttcctggacatcctcttctgcttaggagagaccgagtgaacctaccttcatttcaggagggattggccgcttggcacatgacaactttgccagcttttcctcccttgggttctgatattgccgcactagaggatataggagaggaaaagtaaggtgcagttgccccaacctcagacttaccaggaagcagatacatatgagtgtggaagccggagggtgtttatgtaagagcaccttcctcacttccatacagctctacgcggcaaattaacttgagttttatttatcttatcctctggtttaattacataaatatttattttttaagtgtaattttgccaaataataaaaacagaaggaaattgagattagagggaggtgtttaaagagaggttatagagtaaaagatttgatgctggagaggttaaggtgcaataagaattcagggagaaatgttgttcattattggagggtaaatgatgtggtgcctgaggtctgtacattacctcttaacaatttctgtccttcagatggaaactctttgatttctcagaaaagttgtatgcctatttaataaagctactcatttcctttggaactttatctttaagataatagtttacatgtagtagtacttgaaatctaggattattaactaatatgggcattgtagttaatggcggttgatgggttctaattttggatggagtccagggaagagaaagtgatttctagaaagcctgttcccctcactggacgaaataactccttgtagtagtctcattacttttgaagtaatcccgccacctatctagtgggagagccatccaaatgagaaacctaaaataattggttcttggtagagattcattatttctccactttgttctttaggagattttaggtgttgattttctgttttattttaactcatacctttaaaggaattccccaaagaatgtttacagcaaacttggaatttgtaacctcagctctgggagaggatttttttctgagcgattattatctaaagtgtgttgttgctttaggctcacggcacgcttgcgtatgtctgttaccatgtcactgtggtcctatgccgaatgccctcaggggacttgaatctttccaataaaccaggtttagacagtatgagtcaatgtgcagtgcagcccacacttgagaggatgaatgtatgtgcactgtcactttgctctgggtggaagtatgttattgttgacttattttctctgtgtttgttcctacagcccctttttcatatgttgctcagtctccctttcccttcttggtgcttacacatctcagaccctttagccaaacccttgccagtgacagtattttggttctcagttctcactgttccctctgctcctggagcctttgaataaaaatgcacgtagctatggagtggggtttagctggaaaggtggccttccaacttcacgtcaacttctggctcctcagtttggcagtaaggcagggaagttgttttcctatttctcactgagaagattgtgaatatttccatatggattttccattattgtttgtttgattctttgttttaaaataaaaattctgaatgtacatga

SEQ ID NO: 506 - DNA, 4414 bp, Homo sapiens
gcaatggcggagttcagctcactgtaacctccgcctcctgggttcaagcgattctcctgtctcagcctcccaagcagttgggactataggagcgcaccgccaagccccctaattttgttatttttagtaaagactgggtttcgccatgttggccaggctggtctcgaacccctgacctcaagttatccgctctcctcggcctccaaaagtgctaggattacaggtgtgagccaccgtgcgcggcccgaaataactctttacaggatctcgccctgggccttcccagcccagccggcccgcccgcggggatagcccgggcactatctccctgctgcaggcggtgaggggctcgggtatctttgaaaatagatacgttcacaccctcctaacggcggcgccaagggtggtgggtcccaaaactgtttccccgtaaagagttcccccgcccggtcgcaggaagacgcctgagggggcgctcggagggatccccagcagccgccggggctggaccgtgcggtgcgcaggtgagaagccgggaggggccggacaaccccgaccgcgagccggacccctgctctgaccgcagccctctattggagattctgcctcccctgggacagatggcttcttgagcacactcccacgatgggtggctgctctggtacatctcatccacttcttcatctgtgaagctgtcacccatggtggtgagcagctcctggaggtggtcctcatgaatgaaacctgaggattcctcgttgaagcaggtattcatccatggggttcttccgcggtgaagccagcttgtcgtgctgtcccccttgtcattgaagccatcatggttctggtcaatcatgttgaaagcctccttaaactcctggatgtggaactggtcgaacatcacgaagacattggatgtggccccttgtgctgtggtcgcttcttggtggtcttggctttggtccacttgctgaacattttggcttcaggaagcagtaccttgaagagaaattggagagggagtcaattcctaggatagcagagagatggacaacagacagaatggaggttcctttctgtgcacgtcagaagatgacaggcaagaaaacaaagtggaaaacaataaggaagtgaaggtcaccccagctctgatctttgccatcacagttgctacaatcggctctttccagtttggctacaacactggggtcatcaatgctcctgagacgatcataaaggaatttatcaataaaactttgacggacaaggcaaatgcccctccctctgaggtgctgctcacgaatctctggtccttgtctgtggccatattttccgtcgggggtatgatcggctccttttccgtcggactctttgttaaccgctttggcaggcgcaattcaatgctgattgtcaacctgttggctgccactggtggctgccttatgggactgtgtaaaatagctgagtcagttgaaatgctgatcctgggccgcttggttattggcctcttctgcggactctgcacaggttttgtgcccatgtacattggagagatctcgcctactgccctgaggggtgcctttggcactctcaaccagctgggcatagttattggaattctggtggcccagatctttggtctggaactcatccttgggtctgaagagctatggccggtgctattaggctttaccatccttccagctatcctgcaaagtgcagcccttccatgttgccctgaaagtcccagatttttgctcattaacagaaaaaaagaggagaatgctacgcggatcctccagcggttgtggggcacccaggatgtatcccaagacatccaggagatgaaagatgagagtgcaaggatgtcacaagaaaagcaagtcaccgtgctggagctctttagagtgtccagctaccgacagcccatcatcatttccattgtgctccagctctctcagcagctctctgggatcaatgctgtgttctattactcaacaggaatcttcaaggatgcaggtgttcaacagcccatctatgccaccatcagcgcgggtgtggttaatactatcttcactttactttctctatttctggtggaaagggcaggaagaaggactctgcatatgataggccttggagggatggctttttgttccacgctcatgactgtttctttgttattaaagaatcactataatgggatgagctttgtctgtattggggctatcttggtctttgtggcctgttttgaaattggaccaggccccattccctggtttattgtggccgaactcttcagccagggcccccgcccagctgcgatggcagtggccggctgctccaactggacctccaacttcctagtcggattgctcttcccctctgctgcttactatttaggagcctacgtttttattatcttcaccggcttcctcattaccttcttggcctttaccttcttcaaagtccctgagacccgtggcaggacttttgaggatatcacacgggcctttgaagggcaggcacacggtgcagatagatctgggaaggacggcgtcatggggatgaacagcatcgagcctgctaaggagaccaccaccaatgtctaagtcatgcctccttccacctccctcccggcatgggaaagccacctctccctcaacaagggagagactttatcaggatgaacccaggactgcttctgaatgctgctacttgatttctttctcatcccacgcactccatgagcaccccaaggctgcagtttgttggatcttcaatggctttttaaattttatttcctggacatcctcttctgcttaggagagaccgagtgaacctaccttcatttcaggagggattggccgcttggcacatgacaactttgccagcttttcctcccttgggttctgatattgccgcactagaggatataggagaggaaaagtaaggtgcagttgccccaacctcagacttaccaggaagcagatacatatgagtgtggaagccggagggtgtttatgtaagagcaccttcctcacttccatacagctctacgcggcaaattaacttgagttttatttatcttatcctctggtttaattacataaatatttattttttaagtgtaattttgccaaataataaaaacagaaggaaattgagattagagggaggtgtttaaagagaggttatagagtaaaagatttgatgctggagaggttaaggtgcaataagaattcagggagaaatgttgttcattattggagggtaaatgatgtggtgcctgaggtctgtacattacctcttaacaatttctgtccttcagatggaaactctttgatttctcagaaaagttgtatgcctatttaataaagctactcatttcctttggaactttatctttaagataatagtttacatgtagtagtacttgaaatctaggattattaactaatatgggcattgtagttaatggcggttgatgggttctaattttggatggagtccagggaagagaaagtgatttctagaaagcctgttcccctcactggacgaaataactccttgtagtagtctcattacttttgaagtaatcccgccacctatctagtgggagagccatccaaatgagaaacctaaaataattggttcttggtagagattcattatttctccactttgttctttaggagattttaggtgttgattttctgttttattttaactcatacctttaaaggaattccccaaagaatgtttacagcaaacttggaatttgtaacctcagctctgggagaggatttttttctgagcgattattatctaaagtgtgttgttgctttaggctcacggcacgcttgcgtatgtctgttaccatgtcactgtggtcctatgccgaatgccctcaggggacttgaatctttccaataaaccaggtttagacagtatgagtcaatgtgcagtgcagcccacacttgagaggatgaatgtatgtgcactgtcactttgctctgggtggaagtatgttattgttgacttattttctctgtgtttgttcctacagcccctttttcatatgttgctcagtctccctttcccttcttggtgcttacacatctcagaccctttagccaaacccttgccagtgacagtattttggttctcagttctcactgttccctctgctcctggagcctttgaataaaaatgcacgtagctatggagtggggtttagctggaaaggtggccttccaacttcacgtcaacttctggctcctcagtttggcagtaaggcagggaagttgttttcctatttctcactgagaagattgtgaatatttccatatggattttccattattgtttgtttgattctttgttttaaaataaaaattctgaatgtacatga

SEQ ID NO: 507 - DNA, 3469 bp, Homo sapiens
caacggctgcaggcggggccggcgggggcgcagcggcccgggaggaagcagtaccttgaagagaaattggagagggagtcaattcctaggatagcagagagatggacaacagacagaatggaggttcctttctgtgcacgtcagaagatgacaggcaagaaaacaaagtggaaaacaataaggaagtgaaggtcaccccagctctgatctttgccatcacagttgctacaatcggctctttccagtttggctacaacactggggtcatcaatgctcctgagacgatcataaaggaatttatcaataaaactttgacggacaaggcaaatgcccctccctctgaggtgctgctcacgaatctctggtccttgtctgtggccatattttccgtcgggggtatgatcggctccttttccgtcggactctttgttaaccgctttggcaggcgcaattcaatgctgattgtcaacctgttggctgccactggtggctgccttatgggactgtgtaaaatagctgagtcagttgaaatgctgatcctgggccgcttggttattggcctcttctgcggactctgcacaggttttgtgcccatgtacattggagagatctcgcctactgccctgaggggtgcctttggcactctcaaccagctgggcatagttattggaattctggtggcccagatctttggtctggaactcatccttgggtctgaagagctatggccggtgctattaggctttaccatccttccagctatcctgcaaagtgcagcccttccatgttgccctgaaagtcccagatttttgctcattaacagaaaaaaagaggagaatgctacgcggatcctccagcggttgtggggcacccaggatgtatcccaagacatccaggagatgaaagatgagagtgcaaggatgtcacaagaaaagcaagtcaccgtgctggagctctttagagtgtccagctaccgacagcccatcatcatttccattgtgctccagctctctcagcagctctctgggatcaatgctgtgttctattactcaacaggaatcttcaaggatgcaggtgttcaacagcccatctatgccaccatcagcgcgggtgtggttaatactatcttcactttactttctctatttctggtggaaagggcaggaagaaggactctgcatatgataggccttggagggatggctttttgttccacgctcatgactgtttctttgttattaaagaatcactataatgggatgagctttgtctgtattggggctatcttggtctttgtggcctgttttgaaattggaccaggccccattccctggtttattgtggccgaactcttcagccagggcccccgcccagctgcgatggcagtggccggctgctccaactggacctccaacttcctagtcggattgctcttcccctctgctgcttactatttaggagcctacgtttttattatcttcaccggcttcctcattaccttcttggcctttaccttcttcaaagtccctgagacccgtggcaggacttttgaggatatcacacgggcctttgaagggcaggcacacggtgcagatagatctgggaaggacggcgtcatggggatgaacagcatcgagcctgctaaggagaccaccaccaatgtctaagtcatgcctccttccacctccctcccggcatgggaaagccacctctccctcaacaagggagagactttatcaggatgaacccaggactgcttctgaatgctgctacttgatttctttctcatcccacgcactccatgagcaccccaaggctgcagtttgttggatcttcaatggctttttaaattttatttcctggacatcctcttctgcttaggagagaccgagtgaacctaccttcatttcaggagggattggccgcttggcacatgacaactttgccagcttttcctcccttgggttctgatattgccgcactagaggatataggagaggaaaagtaaggtgcagttgccccaacctcagacttaccaggaagcagatacatatgagtgtggaagccggagggtgtttatgtaagagcaccttcctcacttccatacagctctacgcggcaaattaacttgagttttatttatcttatcctctggtttaattacataaatatttattttttaagtgtaattttgccaaataataaaaacagaaggaaattgagattagagggaggtgtttaaagagaggttatagagtaaaagatttgatgctggagaggttaaggtgcaataagaattcagggagaaatgttgttcattattggagggtaaatgatgtggtgcctgaggtctgtacattacctcttaacaatttctgtccttcagatggaaactctttgatttctcagaaaagttgtatgcctatttaataaagctactcatttcctttggaactttatctttaagataatagtttacatgtagtagtacttgaaatctaggattattaactaatatgggcattgtagttaatggcggttgatgggttctaattttggatggagtccagggaagagaaagtgatttctagaaagcctgttcccctcactggacgaaataactccttgtagtagtctcattacttttgaagtaatcccgccacctatctagtgggagagccatccaaatgagaaacctaaaataattggttcttggtagagattcattatttctccactttgttctttaggagattttaggtgttgattttctgttttattttaactcatacctttaaaggaattccccaaagaatgtttacagcaaacttggaatttgtaacctcagctctgggagaggatttttttctgagcgattattatctaaagtgtgttgttgctttaggctcacggcacgcttgcgtatgtctgttaccatgtcactgtggtcctatgccgaatgccctcaggggacttgaatctttccaataaaccaggtttagacagtatgagtcaatgtgcagtgcagcccacacttgagaggatgaatgtatgtgcactgtcactttgctctgggtggaagtatgttattgttgacttattttctctgtgtttgttcctacagcccctttttcatatgttgctcagtctccctttcccttcttggtgcttacacatctcagaccctttagccaaacccttgccagtgacagtattttggttctcagttctcactgttccctctgctcctggagcctttgaataaaaatgcacgtagctatggagtggggtttagctggaaaggtggccttccaacttcacgtcaacttctggctcctcagtttggcagtaaggcagggaagttgttttcctatttctcactgagaagattgtgaatatttccatatggattttccattattgtttgtttgattctttgttttaaaataaaaattctgaatgtacatga

SEQ ID NO: 508 - DNA, 4011 bp, Homo sapiens
gcaatggcggagttcagctcactgtaacctccgcctcctgggttcaagcgattctcctgtctcagcctcccaagcagttgggactataggagcgcaccgccaagccccctaattttgttatttttagtaaagactgggtttcgccatgttggccaggctggtctcgaacccctgacctcaagttatccgctctcctcggcctccaaaagtgctaggattacaggtgtgagccaccgtgcgcggcccgaaataactctttacaggatctcgccctgggccttcccagcccagccggcccgcccgcggggatagcccgggcactatctccctgctgcaggcggtgaggggctcgggtatctttgaaaatagatacgttcacaccctcctaacggcggcgccaagggtggtgggtcccaaaactgtttccccgtaaagagttcccccgcccggtcgcaggaagacgcctgagggggcgctcggagggatccccagcagccgccggggctggaccgtgcggtgcgcaggtgagaagccgggaggggccggacaaccccgaccgcgagccggacccctgctctgaccgcaggaagcagtaccttgaagagaaattggagagggagtcaattcctaggatagcagagagatggacaacagacagaatggaggttcctttctgtgcacgtcagaagatgacaggcaagaaaacaaagtggaaaacaataaggaagtgaaggtcaccccagctctgatctttgccatcacagttgctacaatcggctctttccagtttggctacaacactggggtcatcaatgctcctgagacgatcataaaggaatttatcaataaaactttgacggacaaggcaaatgcccctccctctgaggtgctgctcacgaatctctggtccttgtctgtggccatattttccgtcgggggtatgatcggctccttttccgtcggactctttgttaaccgctttggcaggcgcaattcaatgctgattgtcaacctgttggctgccactggtggctgccttatgggactgtgtaaaatagctgagtcagttgaaatgctgatcctgggccgcttggttattggcctcttctgcggactctgcacaggttttgtgcccatgtacattggagagatctcgcctactgccctgaggggtgcctttggcactctcaaccagctgggcatagttattggaattctggtggcccagatctttggtctggaactcatccttgggtctgaagagctatggccggtgctattaggctttaccatccttccagctatcctgcaaagtgcagcccttccatgttgccctgaaagtcccagatttttgctcattaacagaaaaaaagaggagaatgctacgcggatcctccagcggttgtggggcacccaggatgtatcccaagacatccaggagatgaaagatgagagtgcaaggatgtcacaagaaaagcaagtcaccgtgctggagctctttagagtgtccagctaccgacagcccatcatcatttccattgtgctccagctctctcagcagctctctgggatcaatgctgtgttctattactcaacaggaatcttcaaggatgcaggtgttcaacagcccatctatgccaccatcagcgcgggtgtggttaatactatcttcactttactttctctatttctggtggaaagggcaggaagaaggactctgcatatgataggccttggagggatggctttttgttccacgctcatgactgtttctttgttattaaagaatcactataatgggatgagctttgtctgtattggggctatcttggtctttgtggcctgttttgaaattggaccaggccccattccctggtttattgtggccgaactcttcagccagggcccccgcccagctgcgatggcagtggccggctgctccaactggacctccaacttcctagtcggattgctcttcccctctgctgcttactatttaggagcctacgtttttattatcttcaccggcttcctcattaccttcttggcctttaccttcttcaaagtccctgagacccgtggcaggacttttgaggatatcacacgggcctttgaagggcaggcacacggtgcagatagatctgggaaggacggcgtcatggggatgaacagcatcgagcctgctaaggagaccaccaccaatgtctaagtcatgcctccttccacctccctcccggcatgggaaagccacctctccctcaacaagggagagactttatcaggatgaacccaggactgcttctgaatgctgctacttgatttctttctcatcccacgcactccatgagcaccccaaggctgcagtttgttggatcttcaatggctttttaaattttatttcctggacatcctcttctgcttaggagagaccgagtgaacctaccttcatttcaggagggattggccgcttggcacatgacaactttgccagcttttcctcccttgggttctgatattgccgcactagaggatataggagaggaaaagtaaggtgcagttgccccaacctcagacttaccaggaagcagatacatatgagtgtggaagccggagggtgtttatgtaagagcaccttcctcacttccatacagctctacgcggcaaattaacttgagttttatttatcttatcctctggtttaattacataaatatttattttttaagtgtaattttgccaaataataaaaacagaaggaaattgagattagagggaggtgtttaaagagaggttatagagtaaaagatttgatgctggagaggttaaggtgcaataagaattcagggagaaatgttgttcattattggagggtaaatgatgtggtgcctgaggtctgtacattacctcttaacaatttctgtccttcagatggaaactctttgatttctcagaaaagttgtatgcctatttaataaagctactcatttcctttggaactttatctttaagataatagtttacatgtagtagtacttgaaatctaggattattaactaatatgggcattgtagttaatggcggttgatgggttctaattttggatggagtccagggaagagaaagtgatttctagaaagcctgttcccctcactggacgaaataactccttgtagtagtctcattacttttgaagtaatcccgccacctatctagtgggagagccatccaaatgagaaacctaaaataattggttcttggtagagattcattatttctccactttgttctttaggagattttaggtgttgattttctgttttattttaactcatacctttaaaggaattccccaaagaatgtttacagcaaacttggaatttgtaacctcagctctgggagaggatttttttctgagcgattattatctaaagtgtgttgttgctttaggctcacggcacgcttgcgtatgtctgttaccatgtcactgtggtcctatgccgaatgccctcaggggacttgaatctttccaataaaccaggtttagacagtatgagtcaatgtgcagtgcagcccacacttgagaggatgaatgtatgtgcactgtcactttgctctgggtggaagtatgttattgttgacttattttctctgtgtttgttcctacagcccctttttcatatgttgctcagtctccctttcccttcttggtgcttacacatctcagaccctttagccaaacccttgccagtgacagtattttggttctcagttctcactgttccctctgctcctggagcctttgaataaaaatgcacgtagctatggagtggggtttagctggaaaggtggccttccaacttcacgtcaacttctggctcctcagtttggcagtaaggcagggaagttgttttcctatttctcactgagaagattgtgaatatttccatatggattttccattattgtttgtttgattctttgttttaaaataaaaattctgaatgtacatga

SEQ ID NO: 509 - DNA, 3595 bp, Homo sapiens
gcagtcgcggggtctgggaggtattcatccatggggttcttccgcggtgaagccagcttgtcgtgctgtcccccttgtcattgaagccatcatggttctggtcaatcatgttgaaagcctccttaaactcctggatgtggaactggtcgaacatcacgaagacattggatgtggccccttgtgctgtggtcgcttcttggtggtcttggctttggtccacttgctgaacattttggcttcaggaagcagtaccttgaagagaaattggagagggagtcaattcctaggatagcagagagatggacaacagacagaatgtcaccccagctctgatctttgccatcacagttgctacaatcggctctttccagtttggctacaacactggggtcatcaatgctcctgagacgatcataaaggaatttatcaataaaactttgacggacaaggcaaatgcccctccctctgaggtgctgctcacgaatctctggtccttgtctgtggccatattttccgtcgggggtatgatcggctccttttccgtcggactctttgttaaccgctttggcaggcgcaattcaatgctgattgtcaacctgttggctgccactggtggctgccttatgggactgtgtaaaatagctgagtcagttgaaatgctgatcctgggccgcttggttattggcctcttctgcggactctgcacaggttttgtgcccatgtacattggagagatctcgcctactgccctgaggggtgcctttggcactctcaaccagctgggcatagttattggaattctggtggcccagatctttggtctggaactcatccttgggtctgaagagctatggccggtgctattaggctttaccatccttccagctatcctgcaaagtgcagcccttccatgttgccctgaaagtcccagatttttgctcattaacagaaaaaaagaggagaatgctacgcggatcctccagcggttgtggggcacccaggatgtatcccaagacatccaggagatgaaagatgagagtgcaaggatgtcacaagaaaagcaagtcaccgtgctggagctctttagagtgtccagctaccgacagcccatcatcatttccattgtgctccagctctctcagcagctctctgggatcaatgctgtgttctattactcaacaggaatcttcaaggatgcaggtgttcaacagcccatctatgccaccatcagcgcgggtgtggttaatactatcttcactttactttctctatttctggtggaaagggcaggaagaaggactctgcatatgataggccttggagggatggctttttgttccacgctcatgactgtttctttgttattaaagaatcactataatgggatgagctttgtctgtattggggctatcttggtctttgtggcctgttttgaaattggaccaggccccattccctggtttattgtggccgaactcttcagccagggcccccgcccagctgcgatggcagtggccggctgctccaactggacctccaacttcctagtcggattgctcttcccctctgctgcttactatttaggagcctacgtttttattatcttcaccggcttcctcattaccttcttggcctttaccttcttcaaagtccctgagacccgtggcaggacttttgaggatatcacacgggcctttgaagggcaggcacacggtgcagatagatctgggaaggacggcgtcatggggatgaacagcatcgagcctgctaaggagaccaccaccaatgtctaagtcatgcctccttccacctccctcccggcatgggaaagccacctctccctcaacaagggagagactttatcaggatgaacccaggactgcttctgaatgctgctacttgatttctttctcatcccacgcactccatgagcaccccaaggctgcagtttgttggatcttcaatggctttttaaattttatttcctggacatcctcttctgcttaggagagaccgagtgaacctaccttcatttcaggagggattggccgcttggcacatgacaactttgccagcttttcctcccttgggttctgatattgccgcactagaggatataggagaggaaaagtaaggtgcagttgccccaacctcagacttaccaggaagcagatacatatgagtgtggaagccggagggtgtttatgtaagagcaccttcctcacttccatacagctctacgcggcaaattaacttgagttttatttatcttatcctctggtttaattacataaatatttattttttaagtgtaattttgccaaataataaaaacagaaggaaattgagattagagggaggtgtttaaagagaggttatagagtaaaagatttgatgctggagaggttaaggtgcaataagaattcagggagaaatgttgttcattattggagggtaaatgatgtggtgcctgaggtctgtacattacctcttaacaatttctgtccttcagatggaaactctttgatttctcagaaaagttgtatgcctatttaataaagctactcatttcctttggaactttatctttaagataatagtttacatgtagtagtacttgaaatctaggattattaactaatatgggcattgtagttaatggcggttgatgggttctaattttggatggagtccagggaagagaaagtgatttctagaaagcctgttcccctcactggacgaaataactccttgtagtagtctcattacttttgaagtaatcccgccacctatctagtgggagagccatccaaatgagaaacctaaaataattggttcttggtagagattcattatttctccactttgttctttaggagattttaggtgttgattttctgttttattttaactcatacctttaaaggaattccccaaagaatgtttacagcaaacttggaatttgtaacctcagctctgggagaggatttttttctgagcgattattatctaaagtgtgttgttgctttaggctcacggcacgcttgcgtatgtctgttaccatgtcactgtggtcctatgccgaatgccctcaggggacttgaatctttccaataaaccaggtttagacagtatgagtcaatgtgcagtgcagcccacacttgagaggatgaatgtatgtgcactgtcactttgctctgggtggaagtatgttattgttgacttattttctctgtgtttgttcctacagcccctttttcatatgttgctcagtctccctttcccttcttggtgcttacacatctcagaccctttagccaaacccttgccagtgacagtattttggttctcagttctcactgttccctctgctcctggagcctttgaataaaaatgcacgtagctatggagtggggtttagctggaaaggtggccttccaacttcacgtcaacttctggctcctcagtttggcagtaaggcagggaagttgttttcctatttctcactgagaagattgtgaatatttccatatggattttccattattgtttgtttgattctttgttttaaaataaaaattctgaatgtacatga

SEQ ID NO: 510 - DNA, 3420 bp, Homo sapiens
ttttcgaggcagttagtgggtcccaacggctgcaggcggggccggcgggggcgcagcggcccgggaggaagcagtaccttgaagagaaattggagagggagtcaattcctaggatagcagagagatggacaacagacagaatgtcaccccagctctgatctttgccatcacagttgctacaatcggctctttccagtttggctacaacactggggtcatcaatgctcctgagacgatcataaaggaatttatcaataaaactttgacggacaaggcaaatgcccctccctctgaggtgctgctcacgaatctctggtccttgtctgtggccatattttccgtcgggggtatgatcggctccttttccgtcggactctttgttaaccgctttggcaggcgcaattcaatgctgattgtcaacctgttggctgccactggtggctgccttatgggactgtgtaaaatagctgagtcagttgaaatgctgatcctgggccgcttggttattggcctcttctgcggactctgcacaggttttgtgcccatgtacattggagagatctcgcctactgccctgaggggtgcctttggcactctcaaccagctgggcatagttattggaattctggtggcccagatctttggtctggaactcatccttgggtctgaagagctatggccggtgctattaggctttaccatccttccagctatcctgcaaagtgcagcccttccatgttgccctgaaagtcccagatttttgctcattaacagaaaaaaagaggagaatgctacgcggatcctccagcggttgtggggcacccaggatgtatcccaagacatccaggagatgaaagatgagagtgcaaggatgtcacaagaaaagcaagtcaccgtgctggagctctttagagtgtccagctaccgacagcccatcatcatttccattgtgctccagctctctcagcagctctctgggatcaatgctgtgttctattactcaacaggaatcttcaaggatgcaggtgttcaacagcccatctatgccaccatcagcgcgggtgtggttaatactatcttcactttactttctctatttctggtggaaagggcaggaagaaggactctgcatatgataggccttggagggatggctttttgttccacgctcatgactgtttctttgttattaaagaatcactataatgggatgagctttgtctgtattggggctatcttggtctttgtggcctgttttgaaattggaccaggccccattccctggtttattgtggccgaactcttcagccagggcccccgcccagctgcgatggcagtggccggctgctccaactggacctccaacttcctagtcggattgctcttcccctctgctgcttactatttaggagcctacgtttttattatcttcaccggcttcctcattaccttcttggcctttaccttcttcaaagtccctgagacccgtggcaggacttttgaggatatcacacgggcctttgaagggcaggcacacggtgcagatagatctgggaaggacggcgtcatggggatgaacagcatcgagcctgctaaggagaccaccaccaatgtctaagtcatgcctccttccacctccctcccggcatgggaaagccacctctccctcaacaagggagagactttatcaggatgaacccaggactgcttctgaatgctgctacttgatttctttctcatcccacgcactccatgagcaccccaaggctgcagtttgttggatcttcaatggctttttaaattttatttcctggacatcctcttctgcttaggagagaccgagtgaacctaccttcatttcaggagggattggccgcttggcacatgacaactttgccagcttttcctcccttgggttctgatattgccgcactagaggatataggagaggaaaagtaaggtgcagttgccccaacctcagacttaccaggaagcagatacatatgagtgtggaagccggagggtgtttatgtaagagcaccttcctcacttccatacagctctacgcggcaaattaacttgagttttatttatcttatcctctggtttaattacataaatatttattttttaagtgtaattttgccaaataataaaaacagaaggaaattgagattagagggaggtgtttaaagagaggttatagagtaaaagatttgatgctggagaggttaaggtgcaataagaattcagggagaaatgttgttcattattggagggtaaatgatgtggtgcctgaggtctgtacattacctcttaacaatttctgtccttcagatggaaactctttgatttctcagaaaagttgtatgcctatttaataaagctactcatttcctttggaactttatctttaagataatagtttacatgtagtagtacttgaaatctaggattattaactaatatgggcattgtagttaatggcggttgatgggttctaattttggatggagtccagggaagagaaagtgatttctagaaagcctgttcccctcactggacgaaataactccttgtagtagtctcattacttttgaagtaatcccgccacctatctagtgggagagccatccaaatgagaaacctaaaataattggttcttggtagagattcattatttctccactttgttctttaggagattttaggtgttgattttctgttttattttaactcatacctttaaaggaattccccaaagaatgtttacagcaaacttggaatttgtaacctcagctctgggagaggatttttttctgagcgattattatctaaagtgtgttgttgctttaggctcacggcacgcttgcgtatgtctgttaccatgtcactgtggtcctatgccgaatgccctcaggggacttgaatctttccaataaaccaggtttagacagtatgagtcaatgtgcagtgcagcccacacttgagaggatgaatgtatgtgcactgtcactttgctctgggtggaagtatgttattgttgacttattttctctgtgtttgttcctacagcccctttttcatatgttgctcagtctccctttcccttcttggtgcttacacatctcagaccctttagccaaacccttgccagtgacagtattttggttctcagttctcactgttccctctgctcctggagcctttgaataaaaatgcacgtagctatggagtggggtttagctggaaaggtggccttccaacttcacgtcaacttctggctcctcagtttggcagtaaggcagggaagttgttttcctatttctcactgagaagattgtgaatatttccatatggattttccattattgtttgtttgattctttgttttaaaataaaaattctgaatgtacatga

SEQ ID NO: 511 - DNA, 3939 bp, Homo sapiens
gcaatggcggagttcagctcactgtaacctccgcctcctgggttcaagcgattctcctgtctcagcctcccaagcagttgggactataggagcgcaccgccaagccccctaattttgttatttttagtaaagactgggtttcgccatgttggccaggctggtctcgaacccctgacctcaagttatccgctctcctcggcctccaaaagtgctaggattacaggtgtgagccaccgtgcgcggcccgaaataactctttacaggatctcgccctgggccttcccagcccagccggcccgcccgcggggatagcccgggcactatctccctgctgcaggcggtgaggggctcgggtatctttgaaaatagatacgttcacaccctcctaacggcggcgccaagggtggtgggtcccaaaactgtttccccgtaaagagttcccccgcccggtcgcaggaagacgcctgagggggcgctcggagggatccccagcagccgccggggctggaccgtgcggtgcgcaggtgagaagccgggaggggccggacaaccccgaccgcgagccggacccctgctctgaccgcaggaagcagtaccttgaagagaaattggagagggagtcaattcctaggatagcagagagatggacaacagacagaatgtcaccccagctctgatctttgccatcacagttgctacaatcggctctttccagtttggctacaacactggggtcatcaatgctcctgagacgatcataaaggaatttatcaataaaactttgacggacaaggcaaatgcccctccctctgaggtgctgctcacgaatctctggtccttgtctgtggccatattttccgtcgggggtatgatcggctccttttccgtcggactctttgttaaccgctttggcaggcgcaattcaatgctgattgtcaacctgttggctgccactggtggctgccttatgggactgtgtaaaatagctgagtcagttgaaatgctgatcctgggccgcttggttattggcctcttctgcggactctgcacaggttttgtgcccatgtacattggagagatctcgcctactgccctgaggggtgcctttggcactctcaaccagctgggcatagttattggaattctggtggcccagatctttggtctggaactcatccttgggtctgaagagctatggccggtgctattaggctttaccatccttccagctatcctgcaaagtgcagcccttccatgttgccctgaaagtcccagatttttgctcattaacagaaaaaaagaggagaatgctacgcggatcctccagcggttgtggggcacccaggatgtatcccaagacatccaggagatgaaagatgagagtgcaaggatgtcacaagaaaagcaagtcaccgtgctggagctctttagagtgtccagctaccgacagcccatcatcatttccattgtgctccagctctctcagcagctctctgggatcaatgctgtgttctattactcaacaggaatcttcaaggatgcaggtgttcaacagcccatctatgccaccatcagcgcgggtgtggttaatactatcttcactttactttctctatttctggtggaaagggcaggaagaaggactctgcatatgataggccttggagggatggctttttgttccacgctcatgactgtttctttgttattaaagaatcactataatgggatgagctttgtctgtattggggctatcttggtctttgtggcctgttttgaaattggaccaggccccattccctggtttattgtggccgaactcttcagccagggcccccgcccagctgcgatggcagtggccggctgctccaactggacctccaacttcctagtcggattgctcttcccctctgctgcttactatttaggagcctacgtttttattatcttcaccggcttcctcattaccttcttggcctttaccttcttcaaagtccctgagacccgtggcaggacttttgaggatatcacacgggcctttgaagggcaggcacacggtgcagatagatctgggaaggacggcgtcatggggatgaacagcatcgagcctgctaaggagaccaccaccaatgtctaagtcatgcctccttccacctccctcccggcatgggaaagccacctctccctcaacaagggagagactttatcaggatgaacccaggactgcttctgaatgctgctacttgatttctttctcatcccacgcactccatgagcaccccaaggctgcagtttgttggatcttcaatggctttttaaattttatttcctggacatcctcttctgcttaggagagaccgagtgaacctaccttcatttcaggagggattggccgcttggcacatgacaactttgccagcttttcctcccttgggttctgatattgccgcactagaggatataggagaggaaaagtaaggtgcagttgccccaacctcagacttaccaggaagcagatacatatgagtgtggaagccggagggtgtttatgtaagagcaccttcctcacttccatacagctctacgcggcaaattaacttgagttttatttatcttatcctctggtttaattacataaatatttattttttaagtgtaattttgccaaataataaaaacagaaggaaattgagattagagggaggtgtttaaagagaggttatagagtaaaagatttgatgctggagaggttaaggtgcaataagaattcagggagaaatgttgttcattattggagggtaaatgatgtggtgcctgaggtctgtacattacctcttaacaatttctgtccttcagatggaaactctttgatttctcagaaaagttgtatgcctatttaataaagctactcatttcctttggaactttatctttaagataatagtttacatgtagtagtacttgaaatctaggattattaactaatatgggcattgtagttaatggcggttgatgggttctaattttggatggagtccagggaagagaaagtgatttctagaaagcctgttcccctcactggacgaaataactccttgtagtagtctcattacttttgaagtaatcccgccacctatctagtgggagagccatccaaatgagaaacctaaaataattggttcttggtagagattcattatttctccactttgttctttaggagattttaggtgttgattttctgttttattttaactcatacctttaaaggaattccccaaagaatgtttacagcaaacttggaatttgtaacctcagctctgggagaggatttttttctgagcgattattatctaaagtgtgttgttgctttaggctcacggcacgcttgcgtatgtctgttaccatgtcactgtggtcctatgccgaatgccctcaggggacttgaatctttccaataaaccaggtttagacagtatgagtcaatgtgcagtgcagcccacacttgagaggatgaatgtatgtgcactgtcactttgctctgggtggaagtatgttattgttgacttattttctctgtgtttgttcctacagcccctttttcatatgttgctcagtctccctttcccttcttggtgcttacacatctcagaccctttagccaaacccttgccagtgacagtattttggttctcagttctcactgttccctctgctcctggagcctttgaataaaaatgcacgtagctatggagtggggtttagctggaaaggtggccttccaacttcacgtcaacttctggctcctcagtttggcagtaaggcagggaagttgttttcctatttctcactgagaagattgtgaatatttccatatggattttccattattgtttgtttgattctttgttttaaaataaaaattctgaatgtacatga

SEQ ID NO: 512 - DNA, 3552 bp, Homo sapiens
actctgctcctgggtctgcactgggagcagctggctttgctcccacacaacctgacttttgttcacaatgcaaagactccaactgttgagagtagaagtactcctgggtgtgaaacaaggagatgaaatgcggcatttctttttttcttctcagacctccactctggagaagagtcagaatgggggcgtcggggaggaggaagcagtaccttgaagagaaattggagagggagtcaattcctaggatagcagagagatggacaacagacagaatgtcaccccagctctgatctttgccatcacagttgctacaatcggctctttccagtttggctacaacactggggtcatcaatgctcctgagacgatcataaaggaatttatcaataaaactttgacggacaaggcaaatgcccctccctctgaggtgctgctcacgaatctctggtccttgtctgtggccatattttccgtcgggggtatgatcggctccttttccgtcggactctttgttaaccgctttggcaggcgcaattcaatgctgattgtcaacctgttggctgccactggtggctgccttatgggactgtgtaaaatagctgagtcagttgaaatgctgatcctgggccgcttggttattggcctcttctgcggactctgcacaggttttgtgcccatgtacattggagagatctcgcctactgccctgaggggtgcctttggcactctcaaccagctgggcatagttattggaattctggtggcccagatctttggtctggaactcatccttgggtctgaagagctatggccggtgctattaggctttaccatccttccagctatcctgcaaagtgcagcccttccatgttgccctgaaagtcccagatttttgctcattaacagaaaaaaagaggagaatgctacgcggatcctccagcggttgtggggcacccaggatgtatcccaagacatccaggagatgaaagatgagagtgcaaggatgtcacaagaaaagcaagtcaccgtgctggagctctttagagtgtccagctaccgacagcccatcatcatttccattgtgctccagctctctcagcagctctctgggatcaatgctgtgttctattactcaacaggaatcttcaaggatgcaggtgttcaacagcccatctatgccaccatcagcgcgggtgtggttaatactatcttcactttactttctctatttctggtggaaagggcaggaagaaggactctgcatatgataggccttggagggatggctttttgttccacgctcatgactgtttctttgttattaaagaatcactataatgggatgagctttgtctgtattggggctatcttggtctttgtggcctgttttgaaattggaccaggccccattccctggtttattgtggccgaactcttcagccagggcccccgcccagctgcgatggcagtggccggctgctccaactggacctccaacttcctagtcggattgctcttcccctctgctgcttactatttaggagcctacgtttttattatcttcaccggcttcctcattaccttcttggcctttaccttcttcaaagtccctgagacccgtggcaggacttttgaggatatcacacgggcctttgaagggcaggcacacggtgcagatagatctgggaaggacggcgtcatggggatgaacagcatcgagcctgctaaggagaccaccaccaatgtctaagtcatgcctccttccacctccctcccggcatgggaaagccacctctccctcaacaagggagagactttatcaggatgaacccaggactgcttctgaatgctgctacttgatttctttctcatcccacgcactccatgagcaccccaaggctgcagtttgttggatcttcaatggctttttaaattttatttcctggacatcctcttctgcttaggagagaccgagtgaacctaccttcatttcaggagggattggccgcttggcacatgacaactttgccagcttttcctcccttgggttctgatattgccgcactagaggatataggagaggaaaagtaaggtgcagttgccccaacctcagacttaccaggaagcagatacatatgagtgtggaagccggagggtgtttatgtaagagcaccttcctcacttccatacagctctacgcggcaaattaacttgagttttatttatcttatcctctggtttaattacataaatatttattttttaagtgtaattttgccaaataataaaaacagaaggaaattgagattagagggaggtgtttaaagagaggttatagagtaaaagatttgatgctggagaggttaaggtgcaataagaattcagggagaaatgttgttcattattggagggtaaatgatgtggtgcctgaggtctgtacattacctcttaacaatttctgtccttcagatggaaactctttgatttctcagaaaagttgtatgcctatttaataaagctactcatttcctttggaactttatctttaagataatagtttacatgtagtagtacttgaaatctaggattattaactaatatgggcattgtagttaatggcggttgatgggttctaattttggatggagtccagggaagagaaagtgatttctagaaagcctgttcccctcactggacgaaataactccttgtagtagtctcattacttttgaagtaatcccgccacctatctagtgggagagccatccaaatgagaaacctaaaataattggttcttggtagagattcattatttctccactttgttctttaggagattttaggtgttgattttctgttttattttaactcatacctttaaaggaattccccaaagaatgtttacagcaaacttggaatttgtaacctcagctctgggagaggatttttttctgagcgattattatctaaagtgtgttgttgctttaggctcacggcacgcttgcgtatgtctgttaccatgtcactgtggtcctatgccgaatgccctcaggggacttgaatctttccaataaaccaggtttagacagtatgagtcaatgtgcagtgcagcccacacttgagaggatgaatgtatgtgcactgtcactttgctctgggtggaagtatgttattgttgacttattttctctgtgtttgttcctacagcccctttttcatatgttgctcagtctccctttcccttcttggtgcttacacatctcagaccctttagccaaacccttgccagtgacagtattttggttctcagttctcactgttccctctgctcctggagcctttgaataaaaatgcacgtagctatggagtggggtttagctggaaaggtggccttccaacttcacgtcaacttctggctcctcagtttggcagtaaggcagggaagttgttttcctatttctcactgagaagattgtgaatatttccatatggattttccattattgtttgtttgattctttgttttaaaataaaaattctgaatgtacatga

SEQ ID NO: 513 - DNA, 3434 bp, Homo sapiens
gtgcgccgcgccgtccctgcggccggggggtgcgggaatgaggacctgagctggggtagaggtggccgagctagagtagaggaagcagtaccttgaagagaaattggagagggagtcaattcctaggatagcagagagatggacaacagacagaatgtcaccccagctctgatctttgccatcacagttgctacaatcggctctttccagtttggctacaacactggggtcatcaatgctcctgagacgatcataaaggaatttatcaataaaactttgacggacaaggcaaatgcccctccctctgaggtgctgctcacgaatctctggtccttgtctgtggccatattttccgtcgggggtatgatcggctccttttccgtcggactctttgttaaccgctttggcaggcgcaattcaatgctgattgtcaacctgttggctgccactggtggctgccttatgggactgtgtaaaatagctgagtcagttgaaatgctgatcctgggccgcttggttattggcctcttctgcggactctgcacaggttttgtgcccatgtacattggagagatctcgcctactgccctgaggggtgcctttggcactctcaaccagctgggcatagttattggaattctggtggcccagatctttggtctggaactcatccttgggtctgaagagctatggccggtgctattaggctttaccatccttccagctatcctgcaaagtgcagcccttccatgttgccctgaaagtcccagatttttgctcattaacagaaaaaaagaggagaatgctacgcggatcctccagcggttgtggggcacccaggatgtatcccaagacatccaggagatgaaagatgagagtgcaaggatgtcacaagaaaagcaagtcaccgtgctggagctctttagagtgtccagctaccgacagcccatcatcatttccattgtgctccagctctctcagcagctctctgggatcaatgctgtgttctattactcaacaggaatcttcaaggatgcaggtgttcaacagcccatctatgccaccatcagcgcgggtgtggttaatactatcttcactttactttctctatttctggtggaaagggcaggaagaaggactctgcatatgataggccttggagggatggctttttgttccacgctcatgactgtttctttgttattaaagaatcactataatgggatgagctttgtctgtattggggctatcttggtctttgtggcctgttttgaaattggaccaggccccattccctggtttattgtggccgaactcttcagccagggcccccgcccagctgcgatggcagtggccggctgctccaactggacctccaacttcctagtcggattgctcttcccctctgctgcttactatttaggagcctacgtttttattatcttcaccggcttcctcattaccttcttggcctttaccttcttcaaagtccctgagacccgtggcaggacttttgaggatatcacacgggcctttgaagggcaggcacacggtgcagatagatctgggaaggacggcgtcatggggatgaacagcatcgagcctgctaaggagaccaccaccaatgtctaagtcatgcctccttccacctccctcccggcatgggaaagccacctctccctcaacaagggagagactttatcaggatgaacccaggactgcttctgaatgctgctacttgatttctttctcatcccacgcactccatgagcaccccaaggctgcagtttgttggatcttcaatggctttttaaattttatttcctggacatcctcttctgcttaggagagaccgagtgaacctaccttcatttcaggagggattggccgcttggcacatgacaactttgccagcttttcctcccttgggttctgatattgccgcactagaggatataggagaggaaaagtaaggtgcagttgccccaacctcagacttaccaggaagcagatacatatgagtgtggaagccggagggtgtttatgtaagagcaccttcctcacttccatacagctctacgcggcaaattaacttgagttttatttatcttatcctctggtttaattacataaatatttattttttaagtgtaattttgccaaataataaaaacagaaggaaattgagattagagggaggtgtttaaagagaggttatagagtaaaagatttgatgctggagaggttaaggtgcaataagaattcagggagaaatgttgttcattattggagggtaaatgatgtggtgcctgaggtctgtacattacctcttaacaatttctgtccttcagatggaaactctttgatttctcagaaaagttgtatgcctatttaataaagctactcatttcctttggaactttatctttaagataatagtttacatgtagtagtacttgaaatctaggattattaactaatatgggcattgtagttaatggcggttgatgggttctaattttggatggagtccagggaagagaaagtgatttctagaaagcctgttcccctcactggacgaaataactccttgtagtagtctcattacttttgaagtaatcccgccacctatctagtgggagagccatccaaatgagaaacctaaaataattggttcttggtagagattcattatttctccactttgttctttaggagattttaggtgttgattttctgttttattttaactcatacctttaaaggaattccccaaagaatgtttacagcaaacttggaatttgtaacctcagctctgggagaggatttttttctgagcgattattatctaaagtgtgttgttgctttaggctcacggcacgcttgcgtatgtctgttaccatgtcactgtggtcctatgccgaatgccctcaggggacttgaatctttccaataaaccaggtttagacagtatgagtcaatgtgcagtgcagcccacacttgagaggatgaatgtatgtgcactgtcactttgctctgggtggaagtatgttattgttgacttattttctctgtgtttgttcctacagcccctttttcatatgttgctcagtctccctttcccttcttggtgcttacacatctcagaccctttagccaaacccttgccagtgacagtattttggttctcagttctcactgttccctctgctcctggagcctttgaataaaaatgcacgtagctatggagtggggtttagctggaaaggtggccttccaacttcacgtcaacttctggctcctcagtttggcagtaaggcagggaagttgttttcctatttctcactgagaagattgtgaatatttccatatggattttccattattgtttgtttgattctttgttttaaaataaaaattctgaatgtacatga

SEQ ID NO: 514 - DNA, 2782 bp, Homo sapiens
tgggtcccaacggctgcaggcggggccggcgggggcgcagcggcccgggaggaagcagtaccttgaagagaaattggagagggagtcaattcctaggatagcagagagatggacaacagacagaatgtcaccccagctctgatctttgccatcacagttgctacaatcggctctttccagtttggctacaacactggggtcatcaatgctcctgagacggcgcaattcaatgctgattgtcaacctgttggctgccactggtggctgccttatgggactgtgtaaaatagctgagtcagttgaaatgctgatcctgggccgcttggttattggcctcttctgcggactctgcacaggttttgtgcccatgtacattggagagatctcgcctactgccctgaggggtgcctttggcactctcaaccagctgggcatagttattggaattctggtggcccagatctttggtctggaactcatccttgggtctgaagagctatggccggtgctattaggctttaccatccttccagctatcctgcaaagtgcagcccttccatgttgccctgaaagtcccagatttttgctcattaacagaaaaaaagaggagaatgctacgcggatcctccagcggttgtggggcacccaggatgtatcccaagacatccaggagatgaaagatgagagtgcaaggatgtcacaagaaaagcaagtcaccgtgctggagctctttagagtgtccagctaccgacagcccatcatcatttccattgtgctccagctctctcagcagctctctgggatcaatgctgtgttctattactcaacaggaatcttcaaggatgcaggtgttcaacagcccatctatgccaccatcagcgcgggtgtggttaatactatcttcactttactttctctatttctggtggaaagggcaggaagaaggactctgcatatgataggccttggagggatggctttttgttccacgctcatgactgtttctttgttattaaagaatcactataatgggatgagctttgtctgtattggggctatcttggtctttgtggcctgttttgaaattggaccaggccccattccctggtttattgtggccgaactcttcagccagggcccccgcccagctgcgatggcagtggccggctgctccaactggacctccaacttcctagtcggattgctcttcccctctgctgcttactatttaggagcctacgtttttattatcttcaccggcttcctcattaccttcttggcctttaccttcttcaaagtccctgagacccgtggcaggacttttgaggatatcacacgggcctttgaagggcaggcacacggtgcagatagatctgggaaggacggcgtcatggggatgaacagcatcgagcctgctaaggagaccaccaccaatgtctaagtcatgcctccttccacctccctcccggcatgggaaagccacctctccctcaacaagggagagactttatcaggatgaacccaggactgcttctgaatgctgctacttgatttctttctcatcccacgcactccatgagcaccccaaggctgcagtttgttggatcttcaatggctttttaaattttatttcctggacatcctcttctgcttaggagagaccgagtgaacctaccttcatttcaggagggattggccgcttggcacatgacaactttgccagcttttcctcccttgggttctgatattgccgcactagaggatataggagaggaaaagtaaggtgcagttgccccaacctcagacttaccaggaagcagatacatatgagtgtggaagccggagggtgtttatgtaagagcaccttcctcacttccatacagctctacgcggcaaattaacttgagttttatttatcttatcctctggtttaattacataaatatttattttttaagtgtaattttgccaaataataaaaacagaaggaaattgagattagagggaggtgtttaaagagaggttatagagtaaaagatttgatgctggagaggttaaggtgcaataagaattcagggagaaatgttgttcattattggagggtaaatgatgtggtgcctgaggtctgtacattacctcttaacaatttctgtccttcagatggaaactctttgatttctcagaaaagttgtatgcctatttaataaagctactcatttcctttggaactttatctttaagataatagtttacatgtagtagtacttgaaatctaggattattaactaatatgggcattgtagttaatggcggttgatgggttctaattttggatggagtccagggaagagaaagtgatttctagaaagcctgttcccctcactggacgaaataactccttgtagtagtctcattacttttgaagtaatcccgccacctatctagtgggagagccatccaaatgagaaacctaaaataattggttcttggtagagattcattatttctccactttgttctttaggagattttaggtgttgattttctgttttattttaactcatacctttaaaggaattccccaaagaatgtttacagcaaacttggaatttgtaacctcagctctgggagaggatttttttctgagcgattattatctaaagtgtgttgttgctttaggctcacggcacgcttgcgtatgtctgttaccatgtcactgtggtcctatgccgaatgccctcaggggacttgaatctttccaataaaccaggtttagacagta

SEQ ID NO: 515 - DNA, 2811 bp, Homo sapiens
acacaacctgacttttgttcacaatgcaaagactccaactgttgagagtagaagtactcctgggtgtgaaacaaggagatgaaatgcggcatttctttttttcttctcagacctccactctggagaagagtcagaatgggggcgtcggggaggaggtcaccccagctctgatctttgccatcacagttgctacaatcggctctttccagtttggctacaacactggggtcatcaatgctcctgagacggcgcaattcaatgctgattgtcaacctgttggctgccactggtggctgccttatgggactgtgtaaaatagctgagtcagttgaaatgctgatcctgggccgcttggttattggcctcttctgcggactctgcacaggttttgtgcccatgtacattggagagatctcgcctactgccctgaggggtgcctttggcactctcaaccagctgggcatagttattggaattctggtggcccagatctttggtctggaactcatccttgggtctgaagagctatggccggtgctattaggctttaccatccttccagctatcctgcaaagtgcagcccttccatgttgccctgaaagtcccagatttttgctcattaacagaaaaaaagaggagaatgctacgcggatcctccagcggttgtggggcacccaggatgtatcccaagacatccaggagatgaaagatgagagtgcaaggatgtcacaagaaaagcaagtcaccgtgctggagctctttagagtgtccagctaccgacagcccatcatcatttccattgtgctccagctctctcagcagctctctgggatcaatgctgtgttctattactcaacaggaatcttcaaggatgcaggtgttcaacagcccatctatgccaccatcagcgcgggtgtggttaatactatcttcactttactttctctatttctggtggaaagggcaggaagaaggactctgcatatgataggccttggagggatggctttttgttccacgctcatgactgtttctttgttattaaagaatcactataatgggatgagctttgtctgtattggggctatcttggtctttgtggcctgttttgaaattggaccaggccccattccctggtttattgtggccgaactcttcagccagggcccccgcccagctgcgatggcagtggccggctgctccaactggacctccaacttcctagtcggattgctcttcccctctgctgcttactatttaggagcctacgtttttattatcttcaccggcttcctcattaccttcttggcctttaccttcttcaaagtccctgagacccgtggcaggacttttgaggatatcacacgggcctttgaagggcaggcacacggtgcagatagatctgggaaggacggcgtcatggggatgaacagcatcgagcctgctaaggagaccaccaccaatgtctaagtcatgcctccttccacctccctcccggcatgggaaagccacctctccctcaacaagggagagactttatcaggatgaacccaggactgcttctgaatgctgctacttgatttctttctcatcccacgcactccatgagcaccccaaggctgcagtttgttggatcttcaatggctttttaaattttatttcctggacatcctcttctgcttaggagagaccgagtgaacctaccttcatttcaggagggattggccgcttggcacatgacaactttgccagcttttcctcccttgggttctgatattgccgcactagaggatataggagaggaaaagtaaggtgcagttgccccaacctcagacttaccaggaagcagatacatatgagtgtggaagccggagggtgtttatgtaagagcaccttcctcacttccatacagctctacgcggcaaattaacttgagttttatttatcttatcctctggtttaattacataaatatttattttttaagtgtaattttgccaaataataaaaacagaaggaaattgagattagagggaggtgtttaaagagaggttatagagtaaaagatttgatgctggagaggttaaggtgcaataagaattcagggagaaatgttgttcattattggagggtaaatgatgtggtgcctgaggtctgtacattacctcttaacaatttctgtccttcagatggaaactctttgatttctcagaaaagttgtatgcctatttaataaagctactcatttcctttggaactttatctttaagataatagtttacatgtagtagtacttgaaatctaggattattaactaatatgggcattgtagttaatggcggttgatgggttctaattttggatggagtccagggaagagaaagtgatttctagaaagcctgttcccctcactggacgaaataactccttgtagtagtctcattacttttgaagtaatcccgccacctatctagtgggagagccatccaaatgagaaacctaaaataattggttcttggtagagattcattatttctccactttgttctttaggagattttaggtgttgattttctgttttattttaactcatacctttaaaggaattccccaaagaatgtttacagcaaacttggaatttgtaacctcagctctgggagaggatttttttctgagcgattattatctaaagtgtgttgttgctttaggctcacggcacgcttgcgtatgtctgttaccatgtcactgtggtcctatgccgaatgccctcaggggacttgaatctttccaataaaccaggtttagacagta

SEQ ID NO: 516 - DNA, 2687 bp, Homo sapiens
ttctatcgccgggagggcggttgaggcggtggtggcggcgtcggcggcggccgggcgctggctgaggggcgctgaggcgggagctgtggcggcgctgggcgcccctggctcctcggcctctgccggccatgggctccgagaaggactccgagtcgccgcgctccacatcgctacatgcggccgcacccgaccctaagtgccgcagcggcggccggcgccggcgcctcaccttgcacagcgtcttctctgcctcggcccgcggccgccgcgcccgggccaagccgcaggccgagccgccgcccccggctgcgcagccgccgcccgccccggcccctgccgcggcccagggcccgccgcccgaggcgctgcccgccgagccggccgccgaggccgaggcggaggccgcggcggcggcggcggagcctgggttcgacgatgaggaggcggcggagggcggtggcccgggcgcggaggaggtggagtgtccgctgtgcctggtgcggctgccgcctgagcgggccccgcgcctcctcagctgtccgcaccgctcgtgccgggactgcctccgccactacctgcgcctggagataagcgagagcagggtgcccatcagctgccccgagtgcagcgagcgactcaacccgcacgacatccgcttgctgctcgccgacccgccgcttatgcacaagtacgaggagttcatgctgcgccgctacctagcctcggaccccgactgccgctggtgcccggccccggactgcggttatgctgttattgcctatggctgtgccagctgcccgaagctaacttgtgagagggaaggttgccagactgagttctgctaccactgcaagcagatatggcatccaaatcagacatgcgatatggcccgtcaacagagggcccagactttacgagttcggaccaaacacacttcaggtctcagttatgggcaagaatctggaccagcagatgacatcaagccatgcccacgatgcagtgcatacattatcaagatgaatgatggaagctgtaatcacatgacctgtgcagtgtgtggctgtgaattctgttggctttgtatgaaagagatctcagacttgcattacctcagcccctctggctgtacattctggggcaagaagccatggagccgtaagaagaaaattctttggcagctgggcacgttgattggtgctccagtggggatttctctcattgctggcattgccattcctgccatggtcattggcattcctgtttatgttggaaggaagattcacagcaggtatgagggaaggaaaacctccaaacacaagaggaatttggctatcactggaggagtgactttgtcggtcattgcatccccagttattgctgcagttagtgttggtattggtgtccccattatgctggcatatgtttatggggttgtgcccatttctctttgtcgtggaggcggctgtggagttagcacagccaacggaaaaggagtgaaaattgaatttgatgaagatgatggtccaatcacagtggcagatgcctggagagccctcaagaatcccagcattggggaaagcagcattgaaggcctgactagtgtattgagcactagtggaagccctacagatggacttagtgttatgcaaggtccttacagcgaaacggccagctttgcagccctctcagggggcacgctgagtggcggcattctctccagtggcaagggaaaatatagcaggttagaagttcaagccgatgtccaaaaggaaattttccccaaagacacagccagtcttggtgcaattagtgacaacgcaagcactcgtgctatggccggttccataatcagttcctacaacccacaggacagagaatgcaacaatatggaaatccaagtggacattgaagccaaaccaagccactatcagctggtgagtggaagcagcacggaggactcgctccatgttcatgctcagatggcagagaatgaagaagaaggtagtggtggcggaggcagtgaagaggatcccccctgcagacaccaaagctgtgaacagaaagactgcctggccagcaaaccttgggacatcagcctggcccagcctgaaagcatccgcagtgacctagagagttctgatgcacagtcagacgatgtgccagacatcacctcagatgagtgtggctccccccgctcccatactgcagcctgcccctcgacccccagagcccaaggtgcaccgagcccaagtgcccatatgaacctctctgccctagccgagggacaaactgtcttgaagccagaaggtggagaagccagagtatgaagtggaatgaatgctcctgttctgagaagcacacttgtaactgcatcttttggaatttttttttttttttttccaaggggtagagatttatgtattttatttcacagattctctggtcacaggtttttgcccagggaaattctgagaaattcacaatttcttaccagataaaacatgaaaagtttgccgttagttcccctcccctcccctccctctttttagttttaatttattggttaaactgatggcagcaatccatgaggtgtgtcaaagagtgtacatatgtatgtgtgtatattgaatgctaaacatattactgaaagacacattttaataaagatttctgtcataattcaactt

SEQ ID NO: 517 - DNA, 2734 bp, Homo sapiens
ttctatcgccgggagggcggttgaggcggtggtggcggcgtcggcggcggccgggcgctggctgaggggcgctgaggcgggagctgtggcggcgctgggcgcccctggctcctcggcctctgccggccatgggctccgagaaggactccgagtcgccgcgctccacatcgctacatgcggccgcacccgaccctaagtgccgcagcggcggccggcgccggcgcctcaccttgcacagcgtcttctctgcctcggcccgcggccgccgcgcccgggccaagccgcaggccgagccgccgcccccggctgcgcagccgccgcccgccccggcccctgccgcggcccagggcccgccgcccgaggcgctgcccgccgagccggccgccgaggccgaggcggaggccgcggcggcggcggcggagcctgggttcgacgatgaggaggcggcggagggcggtggcccgggcgcggaggaggtggagtgtccgctgtgcctggtgcggctgccgcctgagcgggccccgcgcctcctcagctgtccgcaccgctcgtgccgggactgcctccgccactacctgcgcctggagataagcgagagcagggtgcccatcagctgccccgagtgcagcgagcgactcaacccgcacgacatccgcttgctgctcgccgacccgccgcttatgcacaagtacgaggagttcatgctgcgccgctacctagcctcggaccccgactgccgctggtgcccggccccggactgcggttatgctgttattgcctatggctgtgccagctgcccgaagctaacttgtgagagggaaggttgccagactgagttctgctaccactgcaagcagatatggcatccaaatcagacatgcgatatggcccgtcaacagagggcccagactttacgagttcggaccaaacacacttcaggtctcagttatgggcaagaatctggaccagatgacatcaagccatgcccacgatgcagtgcatacattatcaagatgaatgatggaagctgtaatcacatgacctgtgcagtgtgtggctgtgaattctgttggctttgtatgaaagagatctcagacttgcattacctcagcccctctggctgtacattctggggcaagaagccatggagccgtaagaagaaaattctttggcagctgggcacgttgattggtgctccagtggggatttctctcattgctggcattgccattcctgccatggtcattggcattcctgtttatgttggaaggaagattcacagcaggtatgagggaaggaaaacctccaaacacaagaggaatttggctatcactggaggagtgactttgtcggtcattgcatccccagttattgctgcagttagtgttggtattggtgtccccattatgctggcatatgtttatggggttgtgcccatttctctttgtcgtggaggcggctgtggagttagcacagccaacggaaaaggagtgaaaattgaatttgatgaagatgatggtccaatcacagtggcagatgcctggagagccctcaagaatcccagcattggggaaagcagcattgaaggcctgactagtgtattgagcactagtggaagccctacagatggacttagtgttatgcaaggtccttacagcgaaacggccagctttgcagccctctcagggggcacgctgagtggcggcattctctccagtggcaagggaaaatatagcaggttagaagttcaagccgatgtccaaaaggaaattttccccaaagacacagccagtcttggtgcaattagtgacaacgcaagcactcgtgctatggccggttccataatcagttcctacaacccacaggacaggtttagcatgatccatgcatgactcagcaaagtggattttgtctccacagagaatgcaacaatatggaaatccaagtggacattgaagccaaaccaagccactatcagctggtgagtggaagcagcacggaggactcgctccatgttcatgctcagatggcagagaatgaagaagaaggtagtggtggcggaggcagtgaagaggatcccccctgcagacaccaaagctgtgaacagaaagactgcctggccagcaaaccttgggacatcagcctggcccagcctgaaagcatccgcagtgacctagagagttctgatgcacagtcagacgatgtgccagacatcacctcagatgagtgtggctccccccgctcccatactgcagcctgcccctcgacccccagagcccaaggtgcaccgagcccaagtgcccatatgaacctctctgccctagccgagggacaaactgtcttgaagccagaaggtggagaagccagagtatgaagtggaatgaatgctcctgttctgagaagcacacttgtaactgcatcttttggaatttttttttttttttttccaaggggtagagatttatgtattttatttcacagattctctggtcacaggtttttgcccagggaaattctgagaaattcacaatttcttaccagataaaacatgaaaagtttgccgttagttcccctcccctcccctccctctttttagttttaatttattggttaaactgatggcagcaatccatgaggtgtgtcaaagagtgtacatatgtatgtgtgtatattgaatgctaaacatattactgaaagacacattttaataaagatttctgtcataattcaactt

SEQ ID NO: 518 - DNA, 2684 bp, Homo sapiens
ttctatcgccgggagggcggttgaggcggtggtggcggcgtcggcggcggccgggcgctggctgaggggcgctgaggcgggagctgtggcggcgctgggcgcccctggctcctcggcctctgccggccatgggctccgagaaggactccgagtcgccgcgctccacatcgctacatgcggccgcacccgaccctaagtgccgcagcggcggccggcgccggcgcctcaccttgcacagcgtcttctctgcctcggcccgcggccgccgcgcccgggccaagccgcaggccgagccgccgcccccggctgcgcagccgccgcccgccccggcccctgccgcggcccagggcccgccgcccgaggcgctgcccgccgagccggccgccgaggccgaggcggaggccgcggcggcggcggcggagcctgggttcgacgatgaggaggcggcggagggcggtggcccgggcgcggaggaggtggagtgtccgctgtgcctggtgcggctgccgcctgagcgggccccgcgcctcctcagctgtccgcaccgctcgtgccgggactgcctccgccactacctgcgcctggagataagcgagagcagggtgcccatcagctgccccgagtgcagcgagcgactcaacccgcacgacatccgcttgctgctcgccgacccgccgcttatgcacaagtacgaggagttcatgctgcgccgctacctagcctcggaccccgactgccgctggtgcccggccccggactgcggttatgctgttattgcctatggctgtgccagctgcccgaagctaacttgtgagagggaaggttgccagactgagttctgctaccactgcaagcagatatggcatccaaatcagacatgcgatatggcccgtcaacagagggcccagactttacgagttcggaccaaacacacttcaggtctcagttatgggcaagaatctggaccagatgacatcaagccatgcccacgatgcagtgcatacattatcaagatgaatgatggaagctgtaatcacatgacctgtgcagtgtgtggctgtgaattctgttggctttgtatgaaagagatctcagacttgcattacctcagcccctctggctgtacattctggggcaagaagccatggagccgtaagaagaaaattctttggcagctgggcacgttgattggtgctccagtggggatttctctcattgctggcattgccattcctgccatggtcattggcattcctgtttatgttggaaggaagattcacagcaggtatgagggaaggaaaacctccaaacacaagaggaatttggctatcactggaggagtgactttgtcggtcattgcatccccagttattgctgcagttagtgttggtattggtgtccccattatgctggcatatgtttatggggttgtgcccatttctctttgtcgtggaggcggctgtggagttagcacagccaacggaaaaggagtgaaaattgaatttgatgaagatgatggtccaatcacagtggcagatgcctggagagccctcaagaatcccagcattggggaaagcagcattgaaggcctgactagtgtattgagcactagtggaagccctacagatggacttagtgttatgcaaggtccttacagcgaaacggccagctttgcagccctctcagggggcacgctgagtggcggcattctctccagtggcaagggaaaatatagcaggttagaagttcaagccgatgtccaaaaggaaattttccccaaagacacagccagtcttggtgcaattagtgacaacgcaagcactcgtgctatggccggttccataatcagttcctacaacccacaggacagagaatgcaacaatatggaaatccaagtggacattgaagccaaaccaagccactatcagctggtgagtggaagcagcacggaggactcgctccatgttcatgctcagatggcagagaatgaagaagaaggtagtggtggcggaggcagtgaagaggatcccccctgcagacaccaaagctgtgaacagaaagactgcctggccagcaaaccttgggacatcagcctggcccagcctgaaagcatccgcagtgacctagagagttctgatgcacagtcagacgatgtgccagacatcacctcagatgagtgtggctccccccgctcccatactgcagcctgcccctcgacccccagagcccaaggtgcaccgagcccaagtgcccatatgaacctctctgccctagccgagggacaaactgtcttgaagccagaaggtggagaagccagagtatgaagtggaatgaatgctcctgttctgagaagcacacttgtaactgcatcttttggaatttttttttttttttttccaaggggtagagatttatgtattttatttcacagattctctggtcacaggtttttgcccagggaaattctgagaaattcacaatttcttaccagataaaacatgaaaagtttgccgttagttcccctcccctcccctccctctttttagttttaatttattggttaaactgatggcagcaatccatgaggtgtgtcaaagagtgtacatatgtatgtgtgtatattgaatgctaaacatattactgaaagacacattttaataaagatttctgtcataattcaactt

SEQ ID NO: 519 - DNA, 4596 bp, Homo sapiens
tgaatatattctttattaatttatgccgtctgcttaataaacagaaatgttggaaggtgaaccagttgggagtcaccatctgatcaacccctgcctgctttttataaataatgtaactgaaccatcatttactggaagtggcaatcaacctgtgaggaacggcaaaccaaaaagtccaccttgggtgtcatggtgatggaattggaggcggagaccagggagagcagcgggctaggatctctgagagtctccgcaacatggcggccctggaaccacctgaccggcaggaggcggagctccgccccagctcgctcggccccaccccgctcggccctgcccagcgcactcctagaccggggcgcaagggttgtgaggtgtttgagcgaagcgcctgcgcagggcagcggcgcgcggggcggaggctttataatcacttcgtcgttgccgctcggcttctatcgccgggagggcggttgaggcggtggtggcggcgtcggcggcggccgggcgctggctgaggggcgctgaggcgggagctgtggcggcgctgggcgcccctggctcctcggcctctgccggccatgggctccgagaaggactccgagtcgccgcgctccacatcgctacatgcggccgcacccgaccctaagtgccgcagcggcggccggcgccggcgcctcaccttgcacagcgtcttctctgcctcggcccgcggccgccgcgcccgggccaagccgcaggccgagccgccgcccccggctgcgcagccgccgcccgccccggcccctgccgcggcccagggcccgccgcccgaggcgctgcccgccgagccggccgccgaggccgaggcggaggccgcggcggcggcggcggagcctgggttcgacgatgaggaggcggcggagggcggtggcccgggcgcggaggaggtggagtgtccgctgtgcctggtgcggctgccgcctgagcgggccccgcgcctcctcagctgtccgcaccgctcgtgccgggactgcctccgccactacctgcgcctggagataagcgagagcagggtgcccatcagctgccccgagtgcagcgagcgactcaacccgcacgacatccgcttgctgctcgccgacccgccgcttatgcacaagtacgaggagttcatgctgcgccgctacctagcctcggaccccgactgccgctggtgcccggccccggactgcggttatgctgttattgcctatggctgtgccagctgcccgaagctaacttgtgagagggaaggttgccagactgagttctgctaccactgcaagcagatatggcatccaaatcagacatgcgatatggcccgtcaacagagggcccagactttacgagttcggaccaaacacacttcaggtctcagttatgggcaagaatctggaccagcagatgacatcaagccatgcccacgatgcagtgcatacattatcaagatgaatgatggaagctgtaatcacatgacctgtgcagtgtgtggctgtgaattctgttggctttgtatgaaagagatctcagacttgcattacctcagcccctctggctgtacattctggggcaagaagccatggagccgtaagaagaaaattctttggcagctgggcacgttgattggtgctccagtggggatttctctcattgctggcattgccattcctgccatggtcattggcattcctgtttatgttggaaggaagattcacagcaggtatgagggaaggaaaacctccaaacacaagaggaatttggctatcactggaggagtgactttgtcggtcattgcatccccagttattgctgcagttagtgttggtattggtgtccccattatgctggcatatgtttatggggttgtgcccatttctctttgtcgtggaggcggctgtggagttagcacagccaacggaaaaggagtgaaaattgaatttgatgaagatgatggtccaatcacagtggcagatgcctggagagccctcaagaatcccagcattggggaaagcagcattgaaggcctgactagtgtattgagcactagtggaagccctacagatggacttagtgttatgcaaggtccttacagcgaaacggccagctttgcagccctctcagggggcacgctgagtggcggcattctctccagtggcaagggaaaatatagcaggttagaagttcaagccgatgtccaaaaggaaattttccccaaagacacagccagtcttggtgcaattagtgacaacgcaagcactcgtgctatggccggttccataatcagttcctacaacccacaggacagagaatgcaacaatatggaaatccaagtggacattgaagccaaaccaagccactatcagctggtgagtggaagcagcacggaggactcgctccatgttcatgctcagatggcagagaatgaagaagaaggtagtggtggcggaggcagtgaagaggatcccccctgcagacaccaaagctgtgaacagaaagactgcctggccagcaaaccttgggacatcagcctggcccagcctgaaagcatccgcagtgacctagagagttctgatgcacagtcagacgatgtgccagacatcacctcagatgagtgtggctccccccgctcccatactgcagcctgcccctcgacccccagagcccaaggtgcaccgagcccaagtgcccatatgaacctctctgccctagccgagggacaaactgtcttgaagccagaaggtggagaagccagagtatgaagtggaatgaatgctcctgttctgagaagcacacttatgcacttttgtcttcctggccagtgttttactacaatgaggatggcaagtctggacaacagccagcttagaagattcttatctcttgggcactgcagccagacttcacacatttccctgcacctaggacaggaaatgctgttagtggactttggatttctggaagaatgttccctgaagggggcgtgtacttgtgtgaaaaagagaacttgttggaaaaagaggcagacagcctggagatctctgaaacgcaaattatcaactcaaaacttggaattctcttgaagcctcgagagaacaattcacttctttgataaaatcaaagaagtctgttggaggggcagtagtttatggctaaacctatatttcttatctgggttccacttactacagctgtgagatttgggcagtttactctgagtctgttttcacttagccaaaatggagatgatgatcctagttaaggggttgtgaagactgagatggtatactgaaaatgtttttggtaaaggcccatgttttttcctcctgcaggaagaagaagaaatgagttaaaggagattttagatatcatataagaaaggaagcctagacctctaggccagaggctatgaaaaatttaaatttattctaatccttagcgacactttagtagatgaaaaggcccatcatcaccacctagaggcgaacacaaataatgcattagaaaagttacaatagcttggccgggcgtggtggctcatgcctgtaatcccagcactttgggaggctgaggcgggcggctcacaaggtcgggagatcgagaccatcctggctaacacgggtgaaaccccgtctctactaaaaatacacaaaattagccgggcgtagtggtgggcgcctgtagtcccagcaactcgagaggctgaggcaggagaatggcgtgaacccgggaggcaaagcttgcagtgagctgagattgcgccactgcactccagcctgggcaacagagcgagactccgtctcacaaaaaaaaaaaaataataataatagcttagaaaatggagaaagtttaatttcctcttcatacagccttcattcattctgaaatacctaccgcatttcaggtataagatgtagcaatgactaaaatacaaagttcctgtccccatggaacttagactcttaacgggggaaggcaatcagatatataacctggagtgaggataagtaatctgtgaagaaaaacagggaagacagagtggtagatagtgctacttgacatgaccaggttggtcctccttgataaggttccattttattagagactttaatggagcaaggaagagaactatgtgaatatctaggggaagcacataccagacatgaggaataaactacaaaggccctttggtagagcatccttagtctgtttccaaaaaagcatagtatagaggcctatatggctggaacaaagtggaccaaggtggggagagtagtggattaggtcaaagacagctggagcaagattgtgtagattagccaaacaactctgaagacaaggaaattttagatttctttgggccaggaggaggtaatcttcagcgccagacagatgcagtgcttgcggccagctttcaaaaaggttgaaactgggaggggcatgtctgatcactagtactacttggacaggccaatgtgaagaagcttgtggatatggtaaatgaatactcatttatgctcacctaatgtaccttcgtatgctgcagaggctggaaaactaaaaacttcatgtcttaga

SEQ ID NO: 520 - DNA, 3009 bp, Homo sapiens
tgaatatattctttattaatttatgccgtctgcttaataaacagaaatgttggaaggtgaaccagttgggagtcaccatctgatcaacccctgcctgctttttataaataatgtaactgaaccatcatttactggaagtggcaatcaacctgtgaggaacggcaaaccaaaaagtccaccttgggtgtcatggtgatggaattggaggcggagaccagggagagcagcgggctaggatctctgagagtctccgcaacatggcggccctggaaccacctgaccggcaggaggcggagctccgccccagctcgctcggccccaccccgctcggccctgcccagcgcactcctagaccggggcgcaagggttgtgaggtgtttgagcgaagcgcctgcgcagggcagcggcgcgcggggcggaggctttataatcacttcgtcgttgccgctcggcttctatcgccgggagggcggttgaggcggtggtggcggcgtcggcggcggccgggcgctggctgaggggcgctgaggcgggagctgtggcggcgctgggcgcccctggctcctcggcctctgccggccatgggctccgagaaggactccgagtcgccgcgctccacatcgctacatgcggccgcacccgaccctaagtgccgcagcggcggccggcgccggcgcctcaccttgcacagcgtcttctctgcctcggcccgcggccgccgcgcccgggccaagccgcaggccgagccgccgcccccggctgcgcagccgccgcccgccccggcccctgccgcggcccagggcccgccgcccgaggcgctgcccgccgagccggccgccgaggccgaggcggaggccgcggcggcggcggcggagcctgggttcgacgatgaggaggcggcggagggcggtggcccgggcgcggaggaggtggagtgtccgctgtgcctggtgcggctgccgcctgagcgggccccgcgcctcctcagctgtccgcaccgctcgtgccgggactgcctccgccactacctgcgcctggagataagcgagagcagggtgcccatcagctgccccgagtgcagcgagcgactcaacccgcacgacatccgcttgctgctcgccgacccgccgcttatgcacaagtacgaggagttcatgctgcgccgctacctagcctcggaccccgactgccgctggtgcccggccccggactgcggttatgctgttattgcctatggctgtgccagctgcccgaagctaacttgtgagagggaaggttgccagactgagttctgctaccactgcaagcagatatggcatccaaatcagacatgcgatatggcccgtcaacagagggcccagactttacgagttcggaccaaacacacttcaggtctcagttatgggcaagaatctggaccagcagatgacatcaagccatgcccacgatgcagtgcatacattatcaagatgaatgatggaagctgtaatcacatgacctgtgcagtgtgtggctgtgaattctgttggctttgtatgaaagagatctcagacttgcattacctcagcccctctggctgtacattctggggcaagaagccatggagccgtaagaagaaaattctttggcagctgggcacgttgattggtgctccagtggggatttctctcattgctggcattgccattcctgccatggtcattggcattcctgtttatgttggaaggaagattcacagcaggtatgagggaaggaaaacctccaaacacaagaggaatttggctatcactggaggagtgactttgtcggtcattgcatccccagttattgctgcagttagtgttggtattggtgtccccattatgctggcatatgtttatggggttgtgcccatttctctttgtcgtggaggcggctgtggagttagcacagccaacggaaaaggagtgaaaattgaatttgatgaagatgatggtccaatcacagtggcagatgcctggagagccctcaagaatcccagcattggggaaagcagcattgaaggcctgactagtgtattgagcactagtggaagccctacagatggacttagtgttatgcaaggtccttacagcgaaacggccagctttgcagccctctcagggggcacgctgagtggcggcattctctccagtggcaagggaaaatatagcagagaatgcaacaatatggaaatccaagtggacattgaagccaaaccaagccactatcagctggtgagtggaagcagcacggaggactcgctccatgttcatgctcagatggcagagaatgaagaagaaggtagtggtggcggaggcagtgaagaggatcccccctgcagacaccaaagctgtgaacagaaagactgcctggccagcaaaccttgggacatcagcctggcccagcctgaaagcatccgcagtgacctagagagttctgatgcacagtcagacgatgtgccagacatcacctcagatgagtgtggctccccccgctcccatactgcagcctgcccctcgacccccagagcccaaggtgcaccgagcccaagtgcccatatgaacctctctgccctagccgagggacaaactgtcttgaagccagaaggtggagaagccagagtatgaagtggaatgaatgctcctgttctgagaagcacacttgtaactgcatcttttggaatttttttttttttttttccaaggggtagagatttatgtattttatttcacagattctctggtcacaggtttttgcccagggaaattctgagaaattcacaatttcttaccagataaaacatgaaaagtttgccgttagttcccctcccctcccctccctctttttagttttaatttattggttaaactgatggcagcaatccatgaggtgtgtcaaagagtgtacatatgtatgtgtgtatattgaatgctaaacatattactgaaagacacattttaataaagatttctgtcataattcaactta

SEQ ID NO: 521 - DNA, 3191 bp, Homo sapiens
tgaatatattctttattaatttatgccgtctgcttaataaacagaaatgttggaaggtgaaccagttgggagtcaccatctgatcaacccctgcctgctttttataaataatgtaactgaaccatcatttactggaagtggcaatcaacctgtgaggaacggcaaaccaaaaagtccaccttgggtgtcatggtgatggaattggaggcggagaccagggagagcagcgggctaggatctctgagagtctccgcaacatggcggccctggaaccacctgaccggcaggaggcggagctccgccccagctcgctcggccccaccccgctcggccctgcccagcgcactcctagaccggggcgcaagggttgtgaggtgtttgagcgaagcgcctgcgcagggcagcggcgcgcggggcggaggctttataatcacttcgtcgttgccgctcggcttctatcgccgggagggcggttgaggcggtggtggcggcgtcggcggcggccgggcgctggctgaggggcgctgaggcgggagctgtggcggcgctgggcgcccctggctcctcggcctctgccggccatgggctccgagaaggactccgagtcgccgcgctccacatcgctacatgcggccgcacccgaccctaagtgccgcagcggcggccggcgccggcgcctcaccttgcacagcgtcttctctgcctcggcccgcggccgccgcgcccgggccaagccgcaggccgagccgccgcccccggctgcgcagccgccgcccgccccggcccctgccgcggcccagggcccgccgcccgaggcgctgcccgccgagccggccgccgaggccgaggcggaggccgcggcggcggcggcggagcctgggttcgacgatgaggaggcggcggagggcggtggcccgggcgcggaggaggtggagtgtccgctgtgcctggtgcggctgccgcctgagcgggccccgcgcctcctcagctgtccgcaccgctcgtgccgggactgcctccgccactacctgcgcctggagataagcgagagcagggtgcccatcagctgccccgagtgcagcgagcgactcaacccgcacgacatccgcttgctgctcgccgacccgccgcttatgcacaagtacgaggagttcatgctgcgccgctacctagcctcggaccccgactgccgctggtgcccggccccggactgcggttatgctgttattgcctatggctgtgccagctgcccgaagctaacttgtgagagggaaggttgccagactgagttctgctaccactgcaagcagatatggcatccaaatcagacatgcgatatggcccgtcaacagagggcccagactttacgagttcggaccaaacacacttcaggtctcagttatgggcaagaatctggaccagcagatgacatcaagccatgcccacgatgcagtgcatacattatcaagatgaatgatggaagctgtaatcacatgacctgtgcagtgtgtggctgtgaattctgttggctttgtatgaaagagatctcagacttgcattacctcagcccctctggctgtacattctggggcaagaagccatggagccgtaagaagaaaattctttggcagctgggcacgttgattggtgctccagtggggatttctctcattgctggcattgccattcctgccatggtcattggcattcctgtttatgttggaaggaagattcacagcaggtatgagggaaggaaaacctccaaacacaagaggaatttggctatcactggaggagtgactttgtcggtcattgcatccccagttattgctgcagttagtgttggtattggtgtccccattatgctggcatatgtttatggggttgtgcccatttctctttgtcgtggaggcggctgtggagttagcacagccaacggaaaaggagtgaaaattgaatttgatgaagatgatggtccaatcacagtggcagatgcctggagagccctcaagaatcccagcattggggaaagcagcattgaaggcctgactagtgtattgagcactagtggaagccctacagatggacttagtgttatgcaaggtccttacagcgaaacggccagctttgcagccctctcagggggcacgctgagtggcggcattctctccagtggcaagggaaaatatagcaggttagaagttcaagccgatgtccaaaaggaaattttccccaaagacacagccagtcttggtgcaattagtgacaacgcaagcactcgtgctatggccggttccataatcagttcctacaacccacaggacaggtttagcatgatccatgcatgactcagcaaagtggattttgtctccacagagaatgcaacaatatggaaatccaagtggacattgaagccaaaccaagccactatcagctggtgagtggaagcagcacggaggactcgctccatgttcatgctcagatggcagagaatgaagaagaaggtagtggtggcggaggcagtgaagaggatcccccctgcagacaccaaagctgtgaacagaaagactgcctggccagcaaaccttgggacatcagcctggcccagcctgaaagcatccgcagtgacctagagagttctgatgcacagtcagacgatgtgccagacatcacctcagatgagtgtggctccccccgctcccatactgcagcctgcccctcgacccccagagcccaaggtgcaccgagcccaagtgcccatatgaacctctctgccctagccgagggacaaactgtcttgaagccagaaggtggagaagccagagtatgaagtggaatgaatgctcctgttctgagaagcacacttgtaactgcatcttttggaatttttttttttttttttccaaggggtagagatttatgtattttatttcacagattctctggtcacaggtttttgcccagggaaattctgagaaattcacaatttcttaccagataaaacatgaaaagtttgccgttagttcccctcccctcccctccctctttttagttttaatttattggttaaactgatggcagcaatccatgaggtgtgtcaaagagtgtacatatgtatgtgtgtatattgaatgctaaacatattactgaaagacacattttaataaagatttctgtcataattcaactta

SEQ ID NO: 522 - DNA, 1100 bp, Homo sapiens
ggagacgcgggggcgccggcggccgttgggccgcgcaagtactgtcaaggacagttttcgggacgggggacgcggctccaggcacccaacagcactgacggcgaacacttcacgggcgcgcgatgcctcgacaaggcggccgccaccaccacctcagctgccctcgcgggcagcacggcgcggcaaaagcgcacgtcgcctagcgatggcgcggggcggggacacgggctgtaccggcccgtcggagacttccgcttccggggccgccgccatcgctctcccgggcttagaaggcccggctactgacgcgcagtgccagaccttacccctcacggtccttaagtctcggtcgccctcgcctcgcagcctgccacccgcgctcagctgcccgcctcctcagccagccatgctggagcatctgagctcgctgcccacgcagatggattacaagggccagaagctagctgaacagatgtttcagggaattattcttttttctgcaatagttggatttatctacgggtacgtggctgaacagttcgggtggactgtctatatagttatggccggatttgctttttcatgtttgctgacacttcctccatggcccatctatcgccggcatcctctcaagtggttacctgttcaagaatcaagcacagacgacaagaaaccaggggaaagaaaaattaagaggcatgctaaaaataattgaggttttcatgattcagcacctgcttttgtttctgtgagatgagctaaattgctttcataccccagataagagctaaaaccacctaatgctcttatggcacagctgtgtatagatttagttctctttatacttcatttctagcccagttgggttttgatttatataagtagtttagaccttctcttcataatcttgctctgagatggggaacagaacacacaagtatgaagtttctttcaggtgtaaataatgaaaaataaatgcctcataaatgatagtacaatgtaactatcaaagttttataattcattatgagttaaccattttaatgtttccaattaaacctcatagtgcaagttctttgtctaaaaaaaaaaaaaaaaaa

SEQ ID NO: 523 - DNA, 3912 bp, Homo sapiens
ggaagcgctcgcgcaggagaccccgggtgacggggcccggcgccgctaactggagcgaaccccagcgtccgccgacatggcctggaccaagtaccagctgttcctggccgggctcatgcttgttaccggctccatcaacacgctctcggcaaaatgggcggacaatttcatggccgagggctgtggagggagcaaggagcacagcttccagcatcccttcctccaggcagtgggcatgttcctgggagaattctcctgcctggctgccttctacctcctccgatgcagagctgcagggcaatcagactccagcgtagacccccagcagcccttcaaccctcttcttttcctgcccccagcgctctgtgacatgacagggaccagcctcatgtatgtggctctgaacatgaccagtgcctccagcttccagatgctgcggggtgcagtgatcatattcactggcctgttctcggtggccttcctgggccggaggctggtgctgagccagtggctgggcatcctagccaccatcgcggggctggtggtcgtgggcctggctgacctcctgagcaagcacgacagtcagcacaagctcagcgaagtgatcacaggggacctgttgatcatcatggcccagatcatcgttgccatccagatggtgctagaggagaagttcgtctacaaacacaatgtgcacccactgcgggcagttggcactgagggcctctttggctttgtgatcctctccctgctgctggtgcccatgtactacatccccgccggctccttcagcggaaaccctcgtgggacactggaggatgcattggacgccttctgccaggtgggccagcagccgctcattgccgtggcactgctgggcaacatcagcagcattgccttcttcaacttcgcaggcatcagcgtcaccaaggaactgagcgccaccacccgcatggtgttggacagcttgcgcaccgttgtcatctgggcactgagcctggcactgggctgggaggccttccatgcactgcagatccttggcttcctcatactccttataggcactgccctctacaatgggctacaccgtccgctgctgggccgcctgtccaggggccggcccctggcagaggagagcgagcaggagagactgctgggtggcacccgcactcccatcaatgatgccagctgaggttccctggaggcttctactgccacccgggtgctccttctccctgagactgaggccacacaggctggtgggccccgaatgccctatccccaaggcctcaccctgtcccctccctgcagaacccccagggcagctgctgccacagaagataacaacacccaagtcctctttttctcactaccacctgcagggtggtgttacccagcccccacaagcctgagtgcagtggcagacctcagctctctggacccctcctacagcactagagctaaatcatgaagttgaattgtaggaatttaccaccgtagtgtatctgaatcataaactagattatcatagttatctagtttatgagtcataagctagatttgattcttcaaagaagaaaagtcagtgagcaaatttaaaccagaactaagcattatattttctttttttttttttgagacagagtctcgctctgtcgcccaggctggagtgcagtggcacgatctcggcggctcactacaacctctgcctcccaggttcaaatgattctcctgcctcagcctcccgagtagctgggattacaggtgcataacacacctgggtaacttttatagagatggggtttcaccatgttggccaggctggtctcaaactcctgacctcaggtgatctgcctgcctcggcctcccaaagtgctgggattacaggcgtgagacaccacacccagccataactaagcattatgttttctaaaacttctaagatcctccctaaacccgtctggagacatgggttttagcccagactctgcctcaaactcattgtagctcccagcacattacccagttgctctgggccttggtgttatgctctgggaagtagatgttgatgctgtggccttagtgccttctggccccagcattccatgggcctgtgatcttgaccaacctgagaaaacagtaacagcccatccactggaaatacccctctgcccacagcaccacccttctgtgctgttttttttgttgtttgtttgtttcttctttttgagacagagtcttgctctgttgccacgctggagtgcagtggtgtgatctcggctcactgcaacctcccgctcccaggttcaagcaagtcccctgagtagctgggactacaggcgtgtgccaccacatccggctaattttttgcattctttaatagagacggggttttgccatgttggccaggatggtctcaatctcctgacctcatgatccacctgcctcagcctcccaaagtgctggggttacaggcatgagccaccacgcccagccttttttttttttttttttttttcttgagagacagggtcttgctctgtcacccaggcacagcttactgcagccttgaactcctgggatcaatcagtcctcctgcctcagcctcccgagtagctaagactaacaggtatgtaccaccatgcctggtttattgttttatttttttggcagagatgggtctcactgtgttgcccaggctgatctcaaactcctggcctcaagcgatcctcccatctcagcctcccaaagtgctgggattacagacctgagccaccacacctgggcaacagagtgaaacctgtccctgttttcctgctcttactctcacctctgaggcctcctctgcctggaagagattacagggaaattccaggcagcccttgtcaattgtttttatgaattctttacctgttccttttaaagacaaggaaactgaggcccaaagttctaagttgtttggcaaatggagtctcctaccctcagctcctgcaaggacctgggggacccccaggtccagcagccacatgattctgcagcagacagggacctagagcacatctggatctcagccccacccctggcaacctgcctgcctagagaactcccaagatgacagactaagtaggattctgccatttagaataattctggtatcctgggcgttgcgttaagttgcttaactttcattctgtcttacgatagtcttcagaggtgggaacagatgaagaaaccatgccccagagaaggttaagtgacttcctctttatggagccagtgttccaacctaggtttgcctgataccagacctgtggccccacctcccatgcaggtctctgtggggtctttgggatggatctcctagggctgggctggaagcctcatgtactgttgtcttctaggtaaccaccctgaagagaaggggtggcatcaggaaccgcagggaaccaagcagcctttggtccagtgctgctccttggaacagttgagtgtggcctcaaaccattctcctgggtagctcagtcataaaacaccgaatgcctgcctcaaaatagcctctgagggaagggagctgttgacaagtgaagccctcaggttgtgtgggattccagcaggttattacagcttgtggggggagggagggtccattccaccagctttgaatcccagggtcccctcagcttcactgggccacagtgtctgtcccaggaagaagcaaatggacagtgaggatgatggagagactacagctgccttgtctaaaacctgggatcttaaaagtgttattttggcttttattttttaaaaaaagaaaaggaaaattggcaattgtattaatccattctcgaattgctgtaaagaaatacctgagactgggtaatttaatttataaagaaaagaggtttaattggc

SEQ ID NO: 524 - DNA, 4727 bp, Homo sapiens
ctttcaattcctctggcaacaaaccacacactgggatctgacactgtagagtgctttctcttctctttttttgggggggggagggggtgtggttgcatatttaaactctcacgcatttatgtactgaggactgcagtgtaggactttcctgcagaataccatttgatcctattaagaattgtccaaatgttggagcatttgattgaaaaatccttcttagccattttaaagatagctttccaatgattagacgaattgattctttctgtgactcatcagttcatttcctgtaaaattcatgtcttgctgttgatttgtgaataagaaccagagcttgtagaaaccactttaatcatatccaggagtttgcaagaaacaggtgcttaacactaattcacctcctgaacaagaaaaatgggctgtgaccggaactgtgggctcatcgctggggctgtcattggtgctgtcctggctgtgtttggaggtattctaatgccagttggagacctgcttatccagaagacaattaaaaagcaagttgtcctcgaagaaggtacaattgcttttaaaaattgggttaaaacaggcacagaagtttacagacagttttggatctttgatgtgcaaaatccacaggaagtgatgatgaacagcagcaacattcaagttaagcaaagaggtccttatacgtacagagttcgttttctagccaaggaaaatgtaacccaggacgctgaggacaacacagtctctttcctgcagcccaatggtgccatcttcgaaccttcactatcagttggaacagaggctgacaacttcacagttctcaatctggctgtggcagctgcatcccatatctatcaaaatcaatttgttcaaatgatcctcaattcacttattaacaagtcaaaatcttctatgttccaagtcagaactttgagagaactgttatggggctatagggatccatttttgagtttggttccgtaccctgttactaccacagttggtctgttttatccttacaacaatactgcagatggagtttataaagttttcaatggaaaagataacataagtaaagttgccataatcgacacatataaaggtaaaaggaatctgtcctattgggaaagtcactgcgacatgattaatggtacagatgcagcctcatttccaccttttgttgagaaaagccaggtattgcagttcttttcttctgatatttgcaggtcaatctatgctgtatttgaatccgacgttaatctgaaaggaatccctgtgtatagatttgttcttccatccaaggcctttgcctctccagttgaaaacccagacaactattgtttctgcacagaaaaaattatctcaaaaaattgtacatcatatggtgtgctagacatcagcaaatgcaaagaagggagacctgtgtacatttcacttcctcattttctgtatgcaagtcctgatgtttcagaacctattgatggattaaacccaaatgaagaagaacataggacatacttggatattgaacctataactggattcactttacaatttgcaaaacggctgcaggtcaacctattggtcaagccatcagaaaaaattcaagtattaaagaatctgaagaggaactatattgtgcctattctttggcttaatgagactgggaccattggtgatgagaaggcaaacatgttcagaagtcaagtaactggaaaaataaacctccttggcctgatagaaatgatcttactcagtgttggtgtggtgatgtttgttgcttttatgatttcatattgtgcatgcagatcgaaaacaataaaataaacctggctcaagcacaaaccaatttgtgttgttctgattcaataattggtttctgggtggccaattcagaagaagagtgtacatgctcaacaaatcctaggccctgcattcctgtcatcctcatccgggggaaacaccatcatcccagtagctgccctattcaactgcaacagtctccaggaccatcagtatactgcatttcatgtgcaccaaatattttgaaagacatttataaataattggcttatgactcatatttctctatgaataccttcatacagcaggtataactcttttctttatgggcttaaatattttgtcactgatcctgcaaatggacatcattttagcacactagcggtttatattttaaggaccttcattctctgttctgcacctcttctggaaattgagtaaattttgcttttttttttttactcagttgcaacttacgcttggcatcttcagaatgcttttctagcattaagagatgtaaatgataaaggaattattgtatgaaatattacaaagcgtagactatgcattgttattcattataatattttttgctgtcataatcgcctcataaagacaggtttcaaccattaaaatatgttcttccttaaattcctgtgctttttctagttcctcttgtgtcataaaatgtttatcctaattttctctctgaagtatattttatctgaatccacatttctttataaatccatagtccttgctgaaatatgctttctaaatttctaccactttgttctaggctaattttttaagctaattggatgaagaacaaaaagacatttggtttcatcctttacagcagtaggacaattgcaaaggtttttcctttttcataaggagacacattaataggtaactctgtttcttgagcaggggttcacttattctgagagcattagttctcctaaaaagctccagcatagaaagggaagataaaccaaattctagcttgtgttttacccacagaaggatacaggacaaaggaatagtaactggcctgtttggatactaaaatcgaaaataacttttagcctcctccttatgatagccgccagagtaaatgttgagcattactacagaaaagccacaaaccaagaatctacctgtttggaaagatcttttgcatctctgaaggtgcttaaagcatacttagtgcctttccttttaactgggaagataaaagaagtatctgtccaagatattaatatgtaagataacattgtagacatgttcttctgataatacaaggtttattctatttgcattaggatatttgtggacatgtccatctaatataaaggaaagttttttaatcattgaggcatgtagggctgagttatataatgtagaaacttctaaagataattggatgagaatatacatattgacctgtatattatgactaatcatgactcagatcttaatacagggatgatctcatagcatttagatatcagaaaaggttttgacctatatgtctttaatattgtttgaatacatgtataatctttatcattcctcagtgtttcatttctcaaattctgtaaaaggaatataagaggaaagacaattcatatacaaagacaacgagattaaaaatatgcagtaggaaaaataattacttaaggggagattttttttacatgaaatctgggctttggatgtgtgtgtgtgtgtgtgtgtgtgtgtgtgtgcacatatgcactgtggtgggagtggggcaacttggggaatatgttacatgtgtgactttgttttgccctggcgaagttaatgttgttcagaaagggtaaatgtttggacacttgcaattgctcatggatgaatttatatgttttagtcatagaaaaattgtaccctttgatagaagcacattttctttccaaagctggttattaaccacagaattatagcaggtattcataacttaagtttgaaaatcaatagcgtctgcaaatggattaacagattagagaatcaacagcatcggaaaataggttaatgcatattgcttctaacaagtgcatgaagaaatagaagaagctatgtagctttcagttctgacagaaaagggtgaaggagggtatcatttcaagaaaaaaaatagctatcacgcaatggttatctctgaaaatatttgtattaagatgtgtatacatggccaggcatggtggctcatgcctgtaatcccagcactttgggaggcaggtggatcacgaggtcaggagatcaagaccatcctggccaacatggtgaaacctcatctctactaaaaatacaaaaatgagcggggtgtggtggcccatgcctgtagtcccagctgctcgggagactgaatctcttgagcctgggaagcagaggttgcagtgaactgagatcgcgtcactgcactccagcctggtgacagagcgagattccatctcaaaaaaaaaaaacagtatgcacgtacaaatttcttaacctgttatcaatgtctgagctacataattatctttctagttggagtttgttttaggtgtgtaccaactgacatttcagtttttctgtttgaagtccaatgtattagtgactctgtggctgctctcttcacctgccccttgtggcctgtctacaattctaaatggattttgaactcaatgtcgtcgcttctggtttcctgcatataccaatagcattacctatgactttttttttcctgagctattttcactgagctgagctaatgaactaaaactgagttatgtttaatatttgtatcaaatacataaaaggaatactgctttttccttttgtggctcaaaggtagctgcattttaaaatatttgtgaaaataaaaacttttgttattagaaaaatga

SEQ ID NO: 525 - DNA, 2069 bp, Homo sapiens
gaggatgtcaatggctttcagatgtcaggataaccttaaggatagatgaagggttgagagcctgtgcctcatttctgagttctcagctgctatgccgtggaaatcctgtttactttctgcatctgctcctgcaagactctggagccagtcttgaggtcctacatctccgaaagcaagctcttctagaagttgatagctttccaatgattagacgaattgattctttctgtgactcatcagttcatttcctgtaaaattcatgtcttgctgttgatttgtgaataagaaccagagcttgtagaaaccactttaatcatatccaggagtttgcaagaaacaggtgcttaacactaattcacctcctgaacaagaaaaatgggctgtgaccggaactgtgggctcatcgctggggctgtcattggtgctgtcctggctgtgtttggaggtattctaatgccagttggagacctgcttatccagaagacaattaaaaagcaagttgtcctcgaagaaggtacaattgcttttaaaaattgggttaaaacaggcacagaagtttacagacagttttggatctttgatgtgcaaaatccacaggaagtgatgatgaacagcagcaacattcaagttaagcaaagaggtccttatacgtacagagttcgttttctagccaaggaaaatgtaacccaggacgctgaggacaacacagtctctttcctgcagcccaatggtgccatcttcgaaccttcactatcagttggaacagaggctgacaacttcacagttctcaatctggctgtggcagctgcatcccatatctatcaaaatcaatttgttcaaatgatcctcaattcacttattaacaagtcaaaatcttctatgttccaagtcagaactttgagagaactgttatggggctatagggatccatttttgagtttggttccgtaccctgttactaccacagttggtctgttttatccttacaacaatactgcagatggagtttataaagttttcaatggaaaagataacataagtaaagttgccataatcgacacatataaaggtaaaaggaatctgtcctattgggaaagtcactgcgacatgattaatggtacagatgcagcctcatttccaccttttgttgagaaaagccaggtattgcagttcttttcttctgatatttgcaggtcaatctatgctgtatttgaatccgacgttaatctgaaaggaatccctgtgtatagatttgttcttccatccaaggcctttgcctctccagttgaaaacccagacaactattgtttctgcacagaaaaaattatctcaaaaaattgtacatcatatggtgtgctagacatcagcaaatgcaaagaagggagacctgtgtacatttcacttcctcattttctgtatgcaagtcctgatgtttcagaacctattgatggattaaacccaaatgaagaagaacataggacatacttggatattgaacctataactggattcactttacaatttgcaaaacggctgcaggtcaacctattggtcaagccatcagaaaaaattcaagtattaaagaatctgaagaggaactatattgtgcctattctttggcttaatgagactgggaccattggtgatgagaaggcaaacatgttcagaagtcaagtaactggaaaaataaacctccttggcctgatagaaatgatcttactcagtgttggtgtggtgatgtttgttgcttttatgatttcatattgtgcatgcagatcgaaaacaataaaataagtaagtatgtaccaaaaaatattgcttcaataatattagcttatatattacttgttttcactttatcaaagagaagttacatattaggccatatatatttctagacatgtctagccactgatcatttttaaatataggtaaataaacctataaatattatcacgcagatcactaaagtatatctttaattctgggagaaatgagataaaagatgtacttgtgaccattgtaacaatagcacaaataaagcacttgtgccaaagttgtccaaaaaa

SEQ ID NO: 526 - DNA, 2108 bp, Homo sapiens
ctttcaattcctctggcaacaaaccacacactgggatctgacactgtagagtgctttctcttctctttttttgggggggggagggggtgtggttgcatatttaaactctcacgcatttatgtactgaggactgcagtgtaggactttcctgcagaataccatttgatcctattaagaattgtccaaatgttggagcatttgattgaaaaatccttcttagccattttaaagatagctttccaatgattagacgaattgattctttctgtgactcatcagttcatttcctgtaaaattcatgtcttgctgttgatttgtgaataagaaccagagcttgtagaaaccactttaatcatatccaggagtttgcaagaaacaggtgcttaacactaattcacctcctgaacaagaaaaatgggctgtgaccggaactgtgggctcatcgctggggctgtcattggtgctgtcctggctgtgtttggaggtattctaatgccagttggagacctgcttatccagaagacaattaaaaagcaagttgtcctcgaagaaggtacaattgcttttaaaaattgggttaaaacaggcacagaagtttacagacagttttggatctttgatgtgcaaaatccacaggaagtgatgatgaacagcagcaacattcaagttaagcaaagaggtccttatacgtacagagttcgttttctagccaaggaaaatgtaacccaggacgctgaggacaacacagtctctttcctgcagcccaatggtgccatcttcgaaccttcactatcagttggaacagaggctgacaacttcacagttctcaatctggctgtggcagctgcatcccatatctatcaaaatcaatttgttcaaatgatcctcaattcacttattaacaagtcaaaatcttctatgttccaagtcagaactttgagagaactgttatggggctatagggatccatttttgagtttggttccgtaccctgttactaccacagttggtctgttttatccttacaacaatactgcagatggagtttataaagttttcaatggaaaagataacataagtaaagttgccataatcgacacatataaaggtaaaaggaatctgtcctattgggaaagtcactgcgacatgattaatggtacagatgcagcctcatttccaccttttgttgagaaaagccaggtattgcagttcttttcttctgatatttgcaggtcaatctatgctgtatttgaatccgacgttaatctgaaaggaatccctgtgtatagatttgttcttccatccaaggcctttgcctctccagttgaaaacccagacaactattgtttctgcacagaaaaaattatctcaaaaaattgtacatcatatggtgtgctagacatcagcaaatgcaaagaagggagacctgtgtacatttcacttcctcattttctgtatgcaagtcctgatgtttcagaacctattgatggattaaacccaaatgaagaagaacataggacatacttggatattgaacctataactggattcactttacaatttgcaaaacggctgcaggtcaacctattggtcaagccatcagaaaaaattcaagtattaaagaatctgaagaggaactatattgtgcctattctttggcttaatgagactgggaccattggtgatgagaaggcaaacatgttcagaagtcaagtaactggaaaaataaacctccttggcctgatagaaatgatcttactcagtgttggtgtggtgatgtttgttgcttttatgatttcatattgtgcatgcagatcgaaaacaataaaataagtaagtatgtaccaaaaaatattgcttcaataatattagcttatatattacttgttttcactttatcaaagagaagttacatattaggccatatatatttctagacatgtctagccactgatcatttttaaatataggtaaataaacctataaatattatcacgcagatcactaaagtatatctttaattctgggagaaatgagataaaagatgtacttgtgaccattgtaacaatagcacaaataaagcacttgtgccaaagttgtccaaaaaa

SEQ ID NO: 527 - DNA, 1814 bp, Homo sapiens
aagttgctgagacaagggaagagagatgaggaaccagagcttgtagaaaccactttaatcatatccaggagtttgcaagaaacaggtgcttaacactaattcacctcctgaacaagaaaaatgggctgtgaccggaactgtgggctcatcgctggggctgtcattggtgctgtcctggctgtgtttggaggtattctaatgccagttggagacctgcttatccagaagacaattaaaaagcaagttgtcctcgaagaaggtacaattgcttttaaaaattgggttaaaacaggcacagaagtttacagacagttttggatctttgatgtgcaaaatccacaggaagtgatgatgaacagcagcaacattcaagttaagcaaagaggtccttatacgtacagagttcgttttctagccaaggaaaatgtaacccaggacgctgaggacaacacagtctctttcctgcagcccaatggtgccatcttcgaaccttcactatcagttggaacagaggctgacaacttcacagttctcaatctggctgtggcagctgcatcccatatctatcaaaatcaatttgttcaaatgatcctcaattcacttattaacaagtcaaaatcttctatgttccaagtcagaactttgagagaactgttatggggctatagggatccatttttgagtttggttccgtaccctgttactaccacagttggtctgttttatccttacaacaatactgcagatggagtttataaagttttcaatggaaaagataacataagtaaagttgccataatcgacacatataaaggtaaaaggaatctgtcctattgggaaagtcactgcgacatgattaatggtacagatgcagcctcatttccaccttttgttgagaaaagccaggtattgcagttcttttcttctgatatttgcaggtcaatctatgctgtatttgaatccgacgttaatctgaaaggaatccctgtgtatagatttgttcttccatccaaggcctttgcctctccagttgaaaacccagacaactattgtttctgcacagaaaaaattatctcaaaaaattgtacatcatatggtgtgctagacatcagcaaatgcaaagaagggagacctgtgtacatttcacttcctcattttctgtatgcaagtcctgatgtttcagaacctattgatggattaaacccaaatgaagaagaacataggacatacttggatattgaacctataactggattcactttacaatttgcaaaacggctgcaggtcaacctattggtcaagccatcagaaaaaattcaagtattaaagaatctgaagaggaactatattgtgcctattctttggcttaatgagactgggaccattggtgatgagaaggcaaacatgttcagaagtcaagtaactggaaaaataaacctccttggcctgatagaaatgatcttactcagtgttggtgtggtgatgtttgttgcttttatgatttcatattgtgcatgcagatcgaaaacaataaaataagtaagtatgtaccaaaaaatattgcttcaataatattagcttatatattacttgttttcactttatcaaagagaagttacatattaggccatatatatttctagacatgtctagccactgatcatttttaaatataggtaaataaacctataaatattatcacgcagatcactaaagtatatctttaattctgggagaaatgagataaaagatgtacttgtgaccattgtaacaatagcacaaataaagcacttgtgccaaagttgtccaaaaaa

SEQ ID NO: 528 - DNA, 1989 bp, Homo sapiens
atgacattattagttctgccactggtaggcattagaagcaagaaaagggagacggaccgaggaagccactttggtgaaacaaaaagaaaagcatttgtttatttagaacgggcaaaatgatacgtttcagtgggtgttttctttgtactttgatctttttgtactgatatttaagcttctgttttatgatctctttctaatgatagaaccagagcttgtagaaaccactttaatcatatccaggagtttgcaagaaacaggtgcttaacactaattcacctcctgaacaagaaaaatgggctgtgaccggaactgtgggctcatcgctggggctgtcattggtgctgtcctggctgtgtttggaggtattctaatgccagttggagacctgcttatccagaagacaattaaaaagcaagttgtcctcgaagaaggtacaattgcttttaaaaattgggttaaaacaggcacagaagtttacagacagttttggatctttgatgtgcaaaatccacaggaagtgatgatgaacagcagcaacattcaagttaagcaaagaggtccttatacgtacagagttcgttttctagccaaggaaaatgtaacccaggacgctgaggacaacacagtctctttcctgcagcccaatggtgccatcttcgaaccttcactatcagttggaacagaggctgacaacttcacagttctcaatctggctgtggcagctgcatcccatatctatcaaaatcaatttgttcaaatgatcctcaattcacttattaacaagtcaaaatcttctatgttccaagtcagaactttgagagaactgttatggggctatagggatccatttttgagtttggttccgtaccctgttactaccacagttggtctgttttatccttacaacaatactgcagatggagtttataaagttttcaatggaaaagataacataagtaaagttgccataatcgacacatataaaggtaaaaggaatctgtcctattgggaaagtcactgcgacatgattaatggtacagatgcagcctcatttccaccttttgttgagaaaagccaggtattgcagttcttttcttctgatatttgcaggtcaatctatgctgtatttgaatccgacgttaatctgaaaggaatccctgtgtatagatttgttcttccatccaaggcctttgcctctccagttgaaaacccagacaactattgtttctgcacagaaaaaattatctcaaaaaattgtacatcatatggtgtgctagacatcagcaaatgcaaagaagggagacctgtgtacatttcacttcctcattttctgtatgcaagtcctgatgtttcagaacctattgatggattaaacccaaatgaagaagaacataggacatacttggatattgaacctataactggattcactttacaatttgcaaaacggctgcaggtcaacctattggtcaagccatcagaaaaaattcaagtattaaagaatctgaagaggaactatattgtgcctattctttggcttaatgagactgggaccattggtgatgagaaggcaaacatgttcagaagtcaagtaactggaaaaataaacctccttggcctgatagaaatgatcttactcagtgttggtgtggtgatgtttgttgcttttatgatttcatattgtgcatgcagatcgaaaacaataaaataagtaagtatgtaccaaaaaatattgcttcaataatattagcttatatattacttgttttcactttatcaaagagaagttacatattaggccatatatatttctagacatgtctagccactgatcatttttaaatataggtaaataaacctataaatattatcacgcagatcactaaagtatatctttaattctgggagaaatgagataaaagatgtacttgtgaccattgtaacaatagcacaaataaagcacttgtgccaaagttgtccaaaaaa

SEQ ID NO: 529 - DNA, 4666 bp, Homo sapiens
agatgtcaggataaccttaaggatagatgaagggttgagagcctgtgcctcatttctgagttctcagctgctatgccgtggaaatcctgtttactttctgcatctgctcctgcaagactctggagccagtcttgaggtcctacatctccgaaagcaagctcttctagaagttgatagctttccaatgattagacgaattgattctttctgtgactcatcagttcatttcctgtaaaattcatgtcttgctgttgatttgtgaataagaaccagagcttgtagaaaccactttaatcatatccaggagtttgcaagaaacaggtgcttaacactaattcacctcctgaacaagaaaaatgggctgtgaccggaactgtgggctcatcgctggggctgtcattggtgctgtcctggctgtgtttggaggtattctaatgccagttggagacctgcttatccagaagacaattaaaaagcaagttgtcctcgaagaaggtacaattgcttttaaaaattgggttaaaacaggcacagaagtttacagacagttttggatctttgatgtgcaaaatccacaggaagtgatgatgaacagcagcaacattcaagttaagcaaagaggtccttatacgtacagagttcgttttctagccaaggaaaatgtaacccaggacgctgaggacaacacagtctctttcctgcagcccaatggtgccatcttcgaaccttcactatcagttggaacagaggctgacaacttcacagttctcaatctggctgtggcagctgcatcccatatctatcaaaatcaatttgttcaaatgatcctcaattcacttattaacaagtcaaaatcttctatgttccaagtcagaactttgagagaactgttatggggctatagggatccatttttgagtttggttccgtaccctgttactaccacagttggtctgttttatccttacaacaatactgcagatggagtttataaagttttcaatggaaaagataacataagtaaagttgccataatcgacacatataaaggtaaaaggaatctgtcctattgggaaagtcactgcgacatgattaatggtacagatgcagcctcatttccaccttttgttgagaaaagccaggtattgcagttcttttcttctgatatttgcaggtcaatctatgctgtatttgaatccgacgttaatctgaaaggaatccctgtgtatagatttgttcttccatccaaggcctttgcctctccagttgaaaacccagacaactattgtttctgcacagaaaaaattatctcaaaaaattgtacatcatatggtgtgctagacatcagcaaatgcaaagaagggagacctgtgtacatttcacttcctcattttctgtatgcaagtcctgatgtttcagaacctattgatggattaaacccaaatgaagaagaacataggacatacttggatattgaacctataactggattcactttacaatttgcaaaacggctgcaggtcaacctattggtcaagccatcagaaaaaattcaagtattaaagaatctgaagaggaactatattgtgcctattctttggcttaatgagactgggaccattggtgatgagaaggcaaacatgttcagaagtcaagtaactggaaaaataaacctccttggcctgatagaaatgatcttactcagtgttggtgtggtgatgtttgttgcttttatgatttcatattgtgcatgcagatcgaaaacaataaaataaacctggctcaagcacaaaccaatttgtgttgttctgattcaataattggtttctgggtggccaattcagaagaagagtgtacatgctcaacaaatcctaggccctgcattcctgtcatcctcatccgggggaaacaccatcatcccagtagctgccctattcaactgcaacagtctccaggaccatcagtatactgcatttcatgtgcaccaaatattttgaaagacatttataaataattggcttatgactcatatttctctatgaataccttcatacagcaggtataactcttttctttatgggcttaaatattttgtcactgatcctgcaaatggacatcattttagcacactagcggtttatattttaaggaccttcattctctgttctgcacctcttctggaaattgagtaaattttgcttttttttttttactcagttgcaacttacgcttggcatcttcagaatgcttttctagcattaagagatgtaaatgataaaggaattattgtatgaaatattacaaagcgtagactatgcattgttattcattataatattttttgctgtcataatcgcctcataaagacaggtttcaaccattaaaatatgttcttccttaaattcctgtgctttttctagttcctcttgtgtcataaaatgtttatcctaattttctctctgaagtatattttatctgaatccacatttctttataaatccatagtccttgctgaaatatgctttctaaatttctaccactttgttctaggctaattttttaagctaattggatgaagaacaaaaagacatttggtttcatcctttacagcagtaggacaattgcaaaggtttttcctttttcataaggagacacattaataggtaactctgtttcttgagcaggggttcacttattctgagagcattagttctcctaaaaagctccagcatagaaagggaagataaaccaaattctagcttgtgttttacccacagaaggatacaggacaaaggaatagtaactggcctgtttggatactaaaatcgaaaataacttttagcctcctccttatgatagccgccagagtaaatgttgagcattactacagaaaagccacaaaccaagaatctacctgtttggaaagatcttttgcatctctgaaggtgcttaaagcatacttagtgcctttccttttaactgggaagataaaagaagtatctgtccaagatattaatatgtaagataacattgtagacatgttcttctgataatacaaggtttattctatttgcattaggatatttgtggacatgtccatctaatataaaggaaagttttttaatcattgaggcatgtagggctgagttatataatgtagaaacttctaaagataattggatgagaatatacatattgacctgtatattatgactaatcatgactcagatcttaatacagggatgatctcatagcatttagatatcagaaaaggttttgacctatatgtctttaatattgtttgaatacatgtataatctttatcattcctcagtgtttcatttctcaaattctgtaaaaggaatataagaggaaagacaattcatatacaaagacaacgagattaaaaatatgcagtaggaaaaataattacttaaggggagattttttttacatgaaatctgggctttggatgtgtgtgtgtgtgtgtgtgtgtgtgtgtgtgcacatatgcactgtggtgggagtggggcaacttggggaatatgttacatgtgtgactttgttttgccctggcgaagttaatgttgttcagaaagggtaaatgtttggacacttgcaattgctcatggatgaatttatatgttttagtcatagaaaaattgtaccctttgatagaagcacattttctttccaaagctggttattaaccacagaattatagcaggtattcataacttaagtttgaaaatcaatagcgtctgcaaatggattaacagattagagaatcaacagcatcggaaaataggttaatgcatattgcttctaacaagtgcatgaagaaatagaagaagctatgtagctttcagttctgacagaaaagggtgaaggagggtatcatttcaagaaaaaaaatagctatcacgcaatggttatctctgaaaatatttgtattaagatgtgtatacatggccaggcatggtggctcatgcctgtaatcccagcactttgggaggcaggtggatcacgaggtcaggagatcaagaccatcctggccaacatggtgaaacctcatctctactaaaaatacaaaaatgagcggggtgtggtggcccatgcctgtagtcccagctgctcgggagactgaatctcttgagcctgggaagcagaggttgcagtgaactgagatcgcgtcactgcactccagcctggtgacagagcgagattccatctcaaaaaaaaaaaacagtatgcacgtacaaatttcttaacctgttatcaatgtctgagctacataattatctttctagttggagtttgttttaggtgtgtaccaactgacatttcagtttttctgtttgaagtccaatgtattagtgactctgtggctgctctcttcacctgccccttgtggcctgtctacaattctaaatggattttgaactcaatgtcgtcgcttctggtttcctgcatataccaatagcattacctatgactttttttttcctgagctattttcactgagctgagctaatgaactaaaactgagttatgtttaatatttgtatcaaatacataaaaggaatactgctttttccttttgtggctcaaaggtagctgcattttaaaatatttgtgaaaataaaaacttttgttattagaaaaa

SEQ ID NO: 530 - DNA, 4633 bp, Homo sapiens
gatgtacagcagtgatttgacccagcacttggggcaaacacaaccagagtcttcggtgttaattccctggtcttcccaactagcattctgaaagtgcattaacatttgtggccttgtgctctttcatcggacttctaatgatagctttccaatgattagacgaattgattctttctgtgactcatcagttcatttcctgtaaaattcatgtcttgctgttgatttgtgaataagaaccagagcttgtagaaaccactttaatcatatccaggagtttgcaagaaacaggtgcttaacactaattcacctcctgaacaagaaaaatgggctgtgaccggaactgtgggctcatcgctggggctgtcattggtgctgtcctggctgtgtttggaggtattctaatgccagttggagacctgcttatccagaagacaattaaaaagcaagttgtcctcgaagaaggtacaattgcttttaaaaattgggttaaaacaggcacagaagtttacagacagttttggatctttgatgtgcaaaatccacaggaagtgatgatgaacagcagcaacattcaagttaagcaaagaggtccttatacgtacagagttcgttttctagccaaggaaaatgtaacccaggacgctgaggacaacacagtctctttcctgcagcccaatggtgccatcttcgaaccttcactatcagttggaacagaggctgacaacttcacagttctcaatctggctgtggcagctgcatcccatatctatcaaaatcaatttgttcaaatgatcctcaattcacttattaacaagtcaaaatcttctatgttccaagtcagaactttgagagaactgttatggggctatagggatccatttttgagtttggttccgtaccctgttactaccacagttggtctgttttatccttacaacaatactgcagatggagtttataaagttttcaatggaaaagataacataagtaaagttgccataatcgacacatataaaggtaaaaggaatctgtcctattgggaaagtcactgcgacatgattaatggtacagatgcagcctcatttccaccttttgttgagaaaagccaggtattgcagttcttttcttctgatatttgcaggtcaatctatgctgtatttgaatccgacgttaatctgaaaggaatccctgtgtatagatttgttcttccatccaaggcctttgcctctccagttgaaaacccagacaactattgtttctgcacagaaaaaattatctcaaaaaattgtacatcatatggtgtgctagacatcagcaaatgcaaagaagggagacctgtgtacatttcacttcctcattttctgtatgcaagtcctgatgtttcagaacctattgatggattaaacccaaatgaagaagaacataggacatacttggatattgaacctataactggattcactttacaatttgcaaaacggctgcaggtcaacctattggtcaagccatcagaaaaaattcaagtattaaagaatctgaagaggaactatattgtgcctattctttggcttaatgagactgggaccattggtgatgagaaggcaaacatgttcagaagtcaagtaactggaaaaataaacctccttggcctgatagaaatgatcttactcagtgttggtgtggtgatgtttgttgcttttatgatttcatattgtgcatgcagatcgaaaacaataaaataaacctggctcaagcacaaaccaatttgtgttgttctgattcaataattggtttctgggtggccaattcagaagaagagtgtacatgctcaacaaatcctaggccctgcattcctgtcatcctcatccgggggaaacaccatcatcccagtagctgccctattcaactgcaacagtctccaggaccatcagtatactgcatttcatgtgcaccaaatattttgaaagacatttataaataattggcttatgactcatatttctctatgaataccttcatacagcaggtataactcttttctttatgggcttaaatattttgtcactgatcctgcaaatggacatcattttagcacactagcggtttatattttaaggaccttcattctctgttctgcacctcttctggaaattgagtaaattttgcttttttttttttactcagttgcaacttacgcttggcatcttcagaatgcttttctagcattaagagatgtaaatgataaaggaattattgtatgaaatattacaaagcgtagactatgcattgttattcattataatattttttgctgtcataatcgcctcataaagacaggtttcaaccattaaaatatgttcttccttaaattcctgtgctttttctagttcctcttgtgtcataaaatgtttatcctaattttctctctgaagtatattttatctgaatccacatttctttataaatccatagtccttgctgaaatatgctttctaaatttctaccactttgttctaggctaattttttaagctaattggatgaagaacaaaaagacatttggtttcatcctttacagcagtaggacaattgcaaaggtttttcctttttcataaggagacacattaataggtaactctgtttcttgagcaggggttcacttattctgagagcattagttctcctaaaaagctccagcatagaaagggaagataaaccaaattctagcttgtgttttacccacagaaggatacaggacaaaggaatagtaactggcctgtttggatactaaaatcgaaaataacttttagcctcctccttatgatagccgccagagtaaatgttgagcattactacagaaaagccacaaaccaagaatctacctgtttggaaagatcttttgcatctctgaaggtgcttaaagcatacttagtgcctttccttttaactgggaagataaaagaagtatctgtccaagatattaatatgtaagataacattgtagacatgttcttctgataatacaaggtttattctatttgcattaggatatttgtggacatgtccatctaatataaaggaaagttttttaatcattgaggcatgtagggctgagttatataatgtagaaacttctaaagataattggatgagaatatacatattgacctgtatattatgactaatcatgactcagatcttaatacagggatgatctcatagcatttagatatcagaaaaggttttgacctatatgtctttaatattgtttgaatacatgtataatctttatcattcctcagtgtttcatttctcaaattctgtaaaaggaatataagaggaaagacaattcatatacaaagacaacgagattaaaaatatgcagtaggaaaaataattacttaaggggagattttttttacatgaaatctgggctttggatgtgtgtgtgtgtgtgtgtgtgtgtgtgtgtgcacatatgcactgtggtgggagtggggcaacttggggaatatgttacatgtgtgactttgttttgccctggcgaagttaatgttgttcagaaagggtaaatgtttggacacttgcaattgctcatggatgaatttatatgttttagtcatagaaaaattgtaccctttgatagaagcacattttctttccaaagctggttattaaccacagaattatagcaggtattcataacttaagtttgaaaatcaatagcgtctgcaaatggattaacagattagagaatcaacagcatcggaaaataggttaatgcatattgcttctaacaagtgcatgaagaaatagaagaagctatgtagctttcagttctgacagaaaagggtgaaggagggtatcatttcaagaaaaaaaatagctatcacgcaatggttatctctgaaaatatttgtattaagatgtgtatacatggccaggcatggtggctcatgcctgtaatcccagcactttgggaggcaggtggatcacgaggtcaggagatcaagaccatcctggccaacatggtgaaacctcatctctactaaaaatacaaaaatgagcggggtgtggtggcccatgcctgtagtcccagctgctcgggagactgaatctcttgagcctgggaagcagaggttgcagtgaactgagatcgcgtcactgcactccagcctggtgacagagcgagattccatctcaaaaaaaaaaaacagtatgcacgtacaaatttcttaacctgttatcaatgtctgagctacataattatctttctagttggagtttgttttaggtgtgtaccaactgacatttcagtttttctgtttgaagtccaatgtattagtgactctgtggctgctctcttcacctgccccttgtggcctgtctacaattctaaatggattttgaactcaatgtcgtcgcttctggtttcctgcatataccaatagcattacctatgactttttttttcctgagctattttcactgagctgagctaatgaactaaaactgagttatgtttaatatttgtatcaaatacataaaaggaatactgctttttccttttgtggctcaaaggtagctgcattttaaaatatttgtgaaaataaaaacttttgttattagaaaaa

SEQ ID NO: 531 - DNA, 1665 bp, Homo sapiens
accagagcttgtagaaaccactttaatcatatccaggagtttgcaagaaacaggtgcttaacactaattcacctcctgaacaagaaaaatgggctgtgaccggaactgtgggctcatcgctggggctgtcattggtgctgtcctggctgtgtttggaggtattctaatgccagttggagacctgcttatccagaagacaattaaaaagcaagttgtcctcgaagaaggtacaattgcttttaaaaattgggttaaaacaggcacagaagtttacagacagttttggatctttgatgtgcaaaatccacaggaagtgatgatgaacagcagcaacattcaagttaagcaaagaggtccttatacgtacagagttcgttttctagccaaggaaaatgtaacccaggacgctgaggacaacacagtctctttcctgcagcccaatggtgccatcttcgaaccttcactatcagttggaacagaggctgacaacttcacagttctcaatctggctgtggcagctgcatcccatatctatcaaaatcaatttgttcaaatgatcctcaattcacttattaacaagtcaaaatcttctatgttccaagtcagaactttgagagaactgttatggggctatagggatccatttttgagtttggttccgtaccctgttactaccacagttggtctgttttatccttacaacaatactgcagatggagtttataaagttttcaatggaaaagataacataagtaaagttgccataatcgacacatataaaggtaaaaggtcaatctatgctgtatttgaatccgacgttaatctgaaaggaatccctgtgtatagatttgttcttccatccaaggcctttgcctctccagttgaaaacccagacaactattgtttctgcacagaaaaaattatctcaaaaaattgtacatcatatggtgtgctagacatcagcaaatgcaaagaagggagacctgtgtacatttcacttcctcattttctgtatgcaagtcctgatgtttcagaacctattgatggattaaacccaaatgaagaagaacataggacatacttggatattgaacctataactggattcactttacaatttgcaaaacggctgcaggtcaacctattggtcaagccatcagaaaaaattcaagtattaaagaatctgaagaggaactatattgtgcctattctttggcttaatgagactgggaccattggtgatgagaaggcaaacatgttcagaagtcaagtaactggaaaaataaacctccttggcctgatagaaatgatcttactcagtgttggtgtggtgatgtttgttgcttttatgatttcatattgtgcatgcagatcgaaaacaataaaataagtaagtatgtaccaaaaaatattgcttcaataatattagcttatatattacttgttttcactttatcaaagagaagttacatattaggccatatatatttctagacatgtctagccactgatcatttttaaatataggtaaataaacctataaatattatcacgcagatcactaaagtatatctttaattctgggagaaatgagataaaagatgtacttgtgaccattgtaacaatagcacaaataaagcacttgtgccaaagttgtccaaaaaa

SEQ ID NO: 532 - DNA, 1693 bp, Homo sapiens
ctttccaatgattagacgaattgattctttctgtgactcatcagttcatttcctgtaaaattcatgtcttgctgttgatttgtgaataagaaccagagcttgtagaaaccactttaatcatatccaggagtttgcaagaaacaggtgcttaacactaattcacctcctgaacaagaaaaatgggctgtgaccggaactgtgggctcatcgctggggctgtcattggtgctgtcctggctgtgtttggaggtattctaatgccagttggagacctgcttatccagaagacaattaaaaagcaagttgtcctcgaagaaggtacaattgcttttaaaaattgggttaaaacaggcacagaagtttacagacagttttggatctttgatgtgcaaaatccacaggaagtgatgatgaacagcagcaacattcaagttaagcaaagaggtccttatacgtacagagttcgttttctagccaaggaaaatgtaacccaggacgctgaggacaacacagtctctttcctgcagcccaatggtgccatcttcgaaccttcactatcagttggaacagaggctgacaacttcacagttctcaatctggctgtggcatacaacaatactgcagatggagtttataaagttttcaatggaaaagataacataagtaaagttgccataatcgacacatataaaggtaaaaggaatctgtcctattgggaaagtcactgcgacatgattaatggtacagatgcagcctcatttccaccttttgttgagaaaagccaggtattgcagttcttttcttctgatatttgcaggtcaatctatgctgtatttgaatccgacgttaatctgaaaggaatccctgtgtatagatttgttcttccatccaaggcctttgcctctccagttgaaaacccagacaactattgtttctgcacagaaaaaattatctcaaaaaattgtacatcatatggtgtgctagacatcagcaaatgcaaagaagggagacctgtgtacatttcacttcctcattttctgtatgcaagtcctgatgtttcagaacctattgatggattaaacccaaatgaagaagaacataggacatacttggatattgaacctataactggattcactttacaatttgcaaaacggctgcaggtcaacctattggtcaagccatcagaaaaaattcaagtattaaagaatctgaagaggaactatattgtgcctattctttggcttaatgagactgggaccattggtgatgagaaggcaaacatgttcagaagtcaagtaactggaaaaataaacctccttggcctgatagaaatgatcttactcagtgttggtgtggtgatgtttgttgcttttatgatttcatattgtgcatgcagatcgaaaacaataaaataagtaagtatgtaccaaaaaatattgcttcaataatattagcttatatattacttgttttcactttatcaaagagaagttacatattaggccatatatatttctagacatgtctagccactgatcatttttaaatataggtaaataaacctataaatattatcacgcagatcactaaagtatatctttaattctgggagaaatgagataaaagatgtacttgtgaccattgtaacaatagcacaaataaagcacttgtgccaaagttgtccaaaaaa

SEQ ID NO: 533 - DNA, 1747 bp, Homo sapiens
agatgtcaggataaccttaaggatagatgaagggttgagagcctgtgcctcatttctgagttctcagctgctatgccgtggaaatcctgtttactttctgcatctgctcctgcaagactctggagccagtcttgaggtcctacatctccgaaagcaagctcttctagaagttgcaagttgtcctcgaagaaggtacaattgcttttaaaaattgggttaaaacaggcacagaagtttacagacagttttggatctttgatgtgcaaaatccacaggaagtgatgatgaacagcagcaacattcaagttaagcaaagaggtccttatacgtacagagttcgttttctagccaaggaaaatgtaacccaggacgctgaggacaacacagtctctttcctgcagcccaatggtgccatcttcgaaccttcactatcagttggaacagaggctgacaacttcacagttctcaatctggctgtggcagctgcatcccatatctatcaaaatcaatttgttcaaatgatcctcaattcacttattaacaagtcaaaatcttctatgttccaagtcagaactttgagagaactgttatggggctatagggatccatttttgagtttggttccgtaccctgttactaccacagttggtctgttttatccttacaacaatactgcagatggagtttataaagttttcaatggaaaagataacataagtaaagttgccataatcgacacatataaaggtaaaaggaatctgtcctattgggaaagtcactgcgacatgattaatggtacagatgcagcctcatttccaccttttgttgagaaaagccaggtattgcagttcttttcttctgatatttgcaggtcaatctatgctgtatttgaatccgacgttaatctgaaaggaatccctgtgtatagatttgttcttccatccaaggcctttgcctctccagttgaaaacccagacaactattgtttctgcacagaaaaaattatctcaaaaaattgtacatcatatggtgtgctagacatcagcaaatgcaaagaagggagacctgtgtacatttcacttcctcattttctgtatgcaagtcctgatgtttcagaacctattgatggattaaacccaaatgaagaagaacataggacatacttggatattgaacctataactggattcactttacaatttgcaaaacggctgcaggtcaacctattggtcaagccatcagaaaaaattcaagtattaaagaatctgaagaggaactatattgtgcctattctttggcttaatgagactgggaccattggtgatgagaaggcaaacatgttcagaagtcaagtaactggaaaaataaacctccttggcctgatagaaatgatcttactcagtgttggtgtggtgatgtttgttgcttttatgatttcatattgtgcatgcagatcgaaaacaataaaataagtaagtatgtaccaaaaaatattgcttcaataatattagcttatatattacttgttttcactttatcaaagagaagttacatattaggccatatatatttctagacatgtctagccactgatcatttttaaatataggtaaataaacctataaatattatcacgcagatcactaaagtatatctttaattctgggagaaatgagataaaagatgtacttgtgaccattgtaacaatagcacaaataaagcacttgtgccaaagttgtccaaaaaa

SEQ ID NO: 534 - DNA, 1685 bp, Homo sapiens
ctttccaatgattagacgaattgattctttctgtgactcatcagttcatttcctgtaaaattcatgtcttgctgttgatttgtgaataagaaccagagcttgtagaaaccactttaatcatatccaggagtttgcaagaaacaggtgcttaacactaattcacctcctgaacaagaaaaatgggctgtgaccggaactgtgggctcatcgctggggctgtcattggtgctgtcctggctgtgtttggaggtattctaatgccagttggagacctgcttatccagaagacaattaaaaagcaagttgtcctcgaagaaggtacaattgcttttaaaaattgggttaaaacaggcacagaagtttacagacagttttggatctttgatgtgcaaaatccacaggaagtgatgatgaacagcagcaacattcaagttaagcaaagaggtccttatacgtacagagttcgttttctagccaaggaaaatgtaacccaggacgctgaggacaacacagtctctttcctgcagcccaatggtgccatcttcgaaccttcactatcagttggaacagaggctgacaacttcacagttctcaatctggctgtggcagctgcatcccatatctatcaaaatcaatttgttcaaatgatcctcaattcacttattaacaagtcaaaatcttctatgttccaagtcagaactttgagagaactgttatggggctatagggatccatttttgagtttggttccgtaccctgttactaccacagttggtctgttttatccttacaacaatactgcagatggagtttataaagttttcaatggaaaagataacataagtaaagttgccataatcgacacatataaaggtaaaaggaatctgtcctattgggaaagtcactgcgacatgattaatggtacagatgcagcctcatttccaccttttgttgagaaaagccaggtattgcagttcttttcttctgatatttgcagggagacctgtgtacatttcacttcctcattttctgtatgcaagtcctgatgtttcagaacctattgatggattaaacccaaatgaagaagaacataggacatacttggatattgaacctataactggattcactttacaatttgcaaaacggctgcaggtcaacctattggtcaagccatcagaaaaaattcaagtattaaagaatctgaagaggaactatattgtgcctattctttggcttaatgagactgggaccattggtgatgagaaggcaaacatgttcagaagtcaagtaactggaaaaataaacctccttggcctgatagaaatgatcttactcagtgttggtgtggtgatgtttgttgcttttatgatttcatattgtgcatgcagatcgaaaacaataaaataagtaagtatgtaccaaaaaatattgcttcaataatattagcttatatattacttgttttcactttatcaaagagaagttacatattaggccatatatatttctagacatgtctagccactgatcatttttaaatataggtaaataaacctataaatattatcacgcagatcactaaagtatatctttaattctgggagaaatgagataaaagatgtacttgtgaccattgtaacaatagcacaaataaagcacttgtgccaaagttgtccaaaaaa

SEQ ID NO: 535 - DNA, 5070 bp, Homo sapiens
accagaacataaaaatagacccttattagccatatcagtaatgtgctgtgtgggggattttttttttctttcaattcctctggcaacaaaccacacactgggatctgacactgtagagtgctttctcttctctttttttgggggggggagggggtgtggttgcatatttaaactctcacgcatttatgtactgaggactgcagtgtaggactttcctgcagaataccatttgatcctattaagaattgtccaaatgttggagcatttgattgaaaaatccttcttagccattttaaagatagctttccaatgattagacgaattgattctttctgtgactcatcagttcatttcctgtaaaattcatgtcttgctgttgatttgtgaataagaaccagagcttgtagaaaccactttaatcatatccaggagtttgcaagaaacaggtgcttaacactaattcacctcctgaacaagaaaaatgggctgtgaccggaactgtgggctcatcgctggggctgtcattggtgctgtcctggctgtgtttggaggtattctaatgccagttggagacctgcttatccagaagacaattaaaaagcaagttgtcctcgaagaaggtacaattgcttttaaaaattgggttaaaacaggcacagaagtttacagacagttttggatctttgatgtgcaaaatccacaggaagtgatgatgaacagcagcaacattcaagttaagcaaagaggtccttatacgtacagagttcgttttctagccaaggaaaatgtaacccaggacgctgaggacaacacagtctctttcctgcagcccaatggtgccatcttcgaaccttcactatcagttggaacagaggctgacaacttcacagttctcaatctggctgtggcagctgcatcccatatctatcaaaatcaatttgttcaaatgatcctcaattcacttattaacaagtcaaaatcttctatgttccaagtcagaactttgagagaactgttatggggctatagggatccatttttgagtttggttccgtaccctgttactaccacagttggtctgttttatccttacaacaatactgcagatggagtttataaagttttcaatggaaaagataacataagtaaagttgccataatcgacacatataaaggtaaaaggaatctgtcctattgggaaagtcactgcgacatgattaatggtacagatgcagcctcatttccaccttttgttgagaaaagccaggtattgcagttcttttcttctgatatttgcaggtcaatctatgctgtatttgaatccgacgttaatctgaaaggaatccctgtgtatagatttgttcttccatccaaggcctttgcctctccagttgaaaacccagacaactattgtttctgcacagaaaaaattatctcaaaaaattgtacatcatatggtgtgctagacatcagcaaatgcaaagaagggagacctgtgtacatttcacttcctcattttctgtatgcaagtcctgatgtttcagaacctattgatggattaaacccaaatgaagaagaacataggacatacttggatattgaacctataactggattcactttacaatttgcaaaacggctgcaggtcaacctattggtcaagccatcagaaaaaattcaagtattaaagaatctgaagaggaactatattgtgcctattctttggcttaatgagactgggaccattggtgatgagaaggcaaacatgttcagaagtcaagtaactggaaaaataaacctccttggcctgatagaaatgatcttactcagtgttggtgtggtgatgtttgttgcttttatgatttcatattgtgcatgcagatcgaaaacaataaaataagtagtaaatgattcttcacatttgtgcgccagctacatcatgacccttggtaataccgaccaacaggatgaaaattggatatgctttacttttacaaagcacaccttatcttttagttgaagaaatggtggcactatttctttttttgcactaagcaactgcacatttcaaaaggattattgagatgttatgaaaatctctaccttgcacaaaaaaaaacccagcagcttttaaaattcatcatttccacaactgaattgatttccgtttctacagacctggctcaagcacaaaccaatttgtgttgttctgattcaataattggtttctgggtggccaattcagaagaagagtgtacatgctcaacaaatcctaggccctgcattcctgtcatcctcatccgggggaaacaccatcatcccagtagctgccctattcaactgcaacagtctccaggaccatcagtatactgcatttcatgtgcaccaaatattttgaaagacatttataaataattggcttatgactcatatttctctatgaataccttcatacagcaggtataactcttttctttatgggcttaaatattttgtcactgatcctgcaaatggacatcattttagcacactagcggtttatattttaaggaccttcattctctgttctgcacctcttctggaaattgagtaaattttgcttttttttttttactcagttgcaacttacgcttggcatcttcagaatgcttttctagcattaagagatgtaaatgataaaggaattattgtatgaaatattacaaagcgtagactatgcattgttattcattataatattttttgctgtcataatcgcctcataaagacaggtttcaaccattaaaatatgttcttccttaaattcctgtgctttttctagttcctcttgtgtcataaaatgtttatcctaattttctctctgaagtatattttatctgaatccacatttctttataaatccatagtccttgctgaaatatgctttctaaatttctaccactttgttctaggctaattttttaagctaattggatgaagaacaaaaagacatttggtttcatcctttacagcagtaggacaattgcaaaggtttttcctttttcataaggagacacattaataggtaactctgtttcttgagcaggggttcacttattctgagagcattagttctcctaaaaagctccagcatagaaagggaagataaaccaaattctagcttgtgttttacccacagaaggatacaggacaaaggaatagtaactggcctgtttggatactaaaatcgaaaataacttttagcctcctccttatgatagccgccagagtaaatgttgagcattactacagaaaagccacaaaccaagaatctacctgtttggaaagatcttttgcatctctgaaggtgcttaaagcatacttagtgcctttccttttaactgggaagataaaagaagtatctgtccaagatattaatatgtaagataacattgtagacatgttcttctgataatacaaggtttattctatttgcattaggatatttgtggacatgtccatctaatataaaggaaagttttttaatcattgaggcatgtagggctgagttatataatgtagaaacttctaaagataattggatgagaatatacatattgacctgtatattatgactaatcatgactcagatcttaatacagggatgatctcatagcatttagatatcagaaaaggttttgacctatatgtctttaatattgtttgaatacatgtataatctttatcattcctcagtgtttcatttctcaaattctgtaaaaggaatataagaggaaagacaattcatatacaaagacaacgagattaaaaatatgcagtaggaaaaataattacttaaggggagattttttttacatgaaatctgggctttggatgtgtgtgtgtgtgtgtgtgtgtgtgtgtgtgcacatatgcactgtggtgggagtggggcaacttggggaatatgttacatgtgtgactttgttttgccctggcgaagttaatgttgttcagaaagggtaaatgtttggacacttgcaattgctcatggatgaatttatatgttttagtcatagaaaaattgtaccctttgatagaagcacattttctttccaaagctggttattaaccacagaattatagcaggtattcataacttaagtttgaaaatcaatagcgtctgcaaatggattaacagattagagaatcaacagcatcggaaaataggttaatgcatattgcttctaacaagtgcatgaagaaatagaagaagctatgtagctttcagttctgacagaaaagggtgaaggagggtatcatttcaagaaaaaaaatagctatcacgcaatggttatctctgaaaatatttgtattaagatgtgtatacatggccaggcatggtggctcatgcctgtaatcccagcactttgggaggcaggtggatcacgaggtcaggagatcaagaccatcctggccaacatggtgaaacctcatctctactaaaaatacaaaaatgagcggggtgtggtggcccatgcctgtagtcccagctgctcgggagactgaatctcttgagcctgggaagcagaggttgcagtgaactgagatcgcgtcactgcactccagcctggtgacagagcgagattccatctcaaaaaaaaaaaacagtatgcacgtacaaatttcttaacctgttatcaatgtctgagctacataattatctttctagttggagtttgttttaggtgtgtaccaactgacatttcagtttttctgtttgaagtccaatgtattagtgactctgtggctgctctcttcacctgccccttgtggcctgtctacaattctaaatggattttgaactcaatgtcgtcgcttctggtttcctgcatataccaatagcattacctatgactttttttttcctgagctattttcactgagctgagctaatgaactaaaactgagttatgtttaatatttgtatcaaatacataaaaggaatactgctttttccttttgtggctcaaaggtagctgcattttaaaatatttgtgaaaataaaaacttttgttattagaaaaatga

SEQ ID NO: 536 - DNA, 1896 bp, Homo sapiens
ctcccaggggatgtgcgagcagtctccgccctcgcgcgggagctgggaggctgcgagatccctaccgcagtagccgcctctgccgccgcggagcttcccgaacctcttcagccgcccggagccgctcccggagcccggccgtagaggctgcaatcgcagccgggagcccgcagcccgcgccccgagcccgccgccgcccttcgagggcgccccaggccgcgccatggtgaaggtgacgttcaactccgctctggcccagaaggaggccaagaaggacgagcccaagagcggcgaggaggcgctcatcatcccccccgacgccgtcgcggtggactgcaaggacccagatgatgtggtaccagttggccaaagaagagcctggtgttggtgcatgtgctttggactagcatttatgcttgcaggtgttattctaggaggagcatacttgtacaaatattttgcacttcaaccagatgacgtgtactactgtggaataaagtacatcaaagatgatgtcatcttaaatgagccctctgcagatgccccagctgctctctaccagacaattgaagaaaatattaaaatctttgaagaagaagaagttgaatttatcagtgtgcctgtcccagagtttgcagatagtgatcctgccaacattgttcatgactttaacaagaaacttacagcctatttagatcttaacctggataagtgctatgtgatccctctgaacacttccattgttatgccacccagaaacctactggagttacttattaacatcaaggctggaacctatttgcctcagtcctatctgattcatgagcacatggttattactgatcgcattgaaaacattgatcacctgggtttctttatttatcgactgtgtcatgacaaggaaacttacaaactgcaacgcagagaaactattaaaggtattcagaaacgtgaagccagcaattgtttcgcaattcggcattttgaaaacaaatttgccgtggaaactttaatttgttcttgaacagtcaagaaaaacattattgaggaaaattaatatcacagcataaccccaccctttacattttgtgcagtgattattttttaaagtcttctttcatgtaagtagcaaacagggctttactatcttttcatctcattaattcaattaaaaccattaccttaaaatttttttctttcgaagtgtggtgtcttttatatttgaattagtaactgtatgaagtcatagataatagtacatgtcaccttaggtagtaggaagaattacaatttctttaaatcatttatctggatttttatgttttattagcattttcaagaagacggattatctagagaataatcatatatatgcatacgtaaaaatggaccacagtgacttatttgtagttgttagttgccctgctacctagtttgttagtgcatttgagcacacattttaattttcctctaattaaaatgtgcagtattttcagtgtcaaatatatttaactatttagagaatgatttccacctttatgttttaatatcctaggcatctgctgtaataatattttagaaaatgtttggaatttaagaaataacttgtgttactaatttgtataacccatatctgtgcaatggaatataaatatcacaaagttgtttaactagactgcgtgttgtttttcccgtataataaaaccaaagaatagtttggttcttcaaatcttaagagaatccacataaaagaagaaactattttttaaaaattcacttctatatatacaatgagtaaaatcacagattttttctttaaataaaaataagtcattttaataactaaaccagattctttgtggatactattaaagtaacatttaagcctcaaccttg

SEQ ID NO: 537 - DNA, 8300 bp, Homo sapiens
atttaaatacgcggcgccggcgagtgcgtcgagctcgccgcggactcaagatggcggcgtgtggacgtgtacggaggatgttccgcttgtcggcggcgctgcatctgctgctgctattcgcggccggggccgagaaactccccggccagggcgtccacagccagggccagggtcccggggccaactttgtgtccttcgtagggcaggccggaggcggcggcccggcgggtcagcagctgccccagctgcctcagtcatcgcagcttcagcagcaacagcagcagcagcaacagcaacagcagcctcagccgccgcagccgcctttcccggcgggtgggcctccggcccggcggggaggagcgggggctggtgggggctggaagctggcggaggaagagtcctgcagggaggacgtgacccgcgtgtgccctaagcacacctggagcaacaacctggcggtgctcgagtgcctgcaggatgtgagggagcctgaaaatgaaatttcttcagactgcaatcatttgttgtggaattataagctgaacctaactacagatcccaaatttgaatctgtggccagagaggtttgcaaatctactataacagagattaaagaatgtgctgatgaaccggttggaaaaggttacatggtttcctgcttggtggatcaccgaggcaacatcactgagtatcagtgtcaccagtacattaccaagatgacggccatcatttttagtgattaccgtttaatctgtggcttcatggatgactgcaaaaatgacatcaacattctgaaatgtggcagtattcggcttggagaaaaggatgcacattcacaaggtgaggtggtatcatgcttggagaaaggcctggtgaaagaagcagaagaaagagaacccaagattcaagtttctgaactctgcaagaaagccattctccgggtggctgagctgtcatcggatgactttcacttagaccggcatttatattttgcttgccgagatgatcgggagcgtttttgtgaaaatacacaagctggtgagggcagagtgtataagtgcctctttaaccataaatttgaagaatccatgagtgaaaagtgtcgagaagcacttacaacccgccaaaagctgattgcccaggattataaagtcagttattcattggccaaatcctgtaaaagtgacttgaagaaataccggtgcaatgtggaaaaccttccgcgatcgcgtgaagccaggctctcctacttgttaatgtgcctggagtcagctgtacacagagggcgacaagtcagcagtgagtgccagggggagatgctggattaccgacgcatgttgatggaagacttttctctgagccctgagatcatcctaagctgtcggggggagattgaacaccattgttccggattacatcgaaaagggcggaccctacactgtctgatgaaagtagttcgaggggagaaggggaaccttggaatgaactgccagcaggcgcttcaaacactgattcaggagactgaccctggtgcagattaccgcattgatcgagctttgaatgaagcttgtgaatctgtaatccagacagcctgcaaacatataagatctggagacccaatgatcttgtcgtgcctgatggaacatttatacacagagaagatggtagaagactgtgaacaccgtctcttagagctgcagtatttcatctcccgggattggaagctggaccctgtcctgtaccgcaagtgccagggagacgcttctcgtctttgccacacccacggttggaatgagaccagtgaatttatgcctcagggagctgtgttctcttgtttatacagacacgcctaccgcactgaggaacagggaaggaggctctcacgggagtgccgagctgaagtccaaaggatcctacaccagcgtgccatggatgtcaagctggatcctgccctccaggataagtgcctgattgatctgggaaaatggtgcagtgagaaaacagagactggacaggagctggagtgccttcaggaccatctggatgacttggtggtggagtgtagagatatagttggcaacctcactgagttagaatcagaggatattcaaatagaagccttgctgatgagagcctgtgagcccataattcagaacttctgccacgatgtggcagataaccagatagactctggggacctgatggagtgtctgatacagaacaaacaccagaaggacatgaacgagaagtgtgccatcggagttacccacttccagctggtgcagatgaaggattttcggttttcttacaagtttaaaatggcctgcaaggaggacgtgttgaagctttgcccaaacataaaaaagaaggtggacgtggtgatctgcctgagcacgaccgtgcgcaatgacactctgcaggaagccaaggagcacagggtgtccctgaagtgccgcaggcagctccgtgtggaggagctggagatgacggaggacatccgcttggagccagatctatacgaagcctgcaagagtgacatcaaaaacttctgttccgctgtgcaatatggcaacgctcagattatcgaatgtctgaaagaaaacaagaagcagctaagcacccgctgccaccaaaaagtatttaagctgcaggagacagagatgatggacccagagctagactacaccctcatgagggtctgcaagcagatgataaagaggttctgtccggaagcagattctaaaaccatgttgcagtgcttgaagcaaaataaaaacagtgaattgatggatcccaaatgcaaacagatgataaccaagcgccagatcacccagaacacagattaccgcttaaaccccatgttaagaaaagcctgtaaagctgacattcctaaattctgtcacggtatcctgactaaggccaaggatgattcagaattagaaggacaagtcatctcttgcctgaagctgagatatgctgaccagcgcctgtcttcagactgtgaagaccagatccgaatcattatccaggagtccgccctggactaccgcctggatcctcagctccagctgcactgctcagacgagatctccagtctatgtgctgaagaagcagcagcccaagagcagacaggtcaggtggaggagtgcctcaaggtcaacctgctcaagatcaaaacagaattgtgtaaaaaggaagtgctaaacatgctgaaggaaagcaaagcagacatctttgttgacccggtacttcatactgcttgtgccctggacattaaacaccactgcgcagccatcacccctggccgcgggcgtcaaatgtcctgtctcatggaagcactggaggataagcgggtgaggttacagcccgagtgcaaaaagcgcctcaatgaccggattgagatgtggagttacgcagcaaaggtggccccagcagatggcttctctgatcttgccatgcaagtaatgacgtctccatctaagaactacattctctctgtgatcagtgggagcatctgtatattgttcctgattggcctgatgtgtggacggatcaccaagcgagtgacacgagagctcaaggacaggctacaatacaggtcagagacaatggcttataaaggtttagtgtggtctcaggatgtgacaggcagtccagcctgacctttctgcacactccagacaaacttcccagacaagctcctttgtgcctctacgtggagagggtgtggaaagttatcacattaaaagatggaggatttgctctgttttttttctttctgtccatttgctgcgtgtacccactctagtaggcattggctaaatgttgtattttggcgattcatcaacctttgcagaatatgggctttatagaagcaatattcttggccatcccgcctcattcctccagtgtggagatgacaagtctgggtgtgagagggaggggtccgggcatcatggttcagcgtggcactcctttggttgagtttggggcatgagatcacagtggctgcacaagagagcagtgtgtacagtaggagagacatttatgtaatatatattttattaacctgttagatgtccacaaagtattataaatcacgtgcctaaaactgtccatgtagaccaaggcctgccctcggcgccccccactcttgcctctgctctgcacagtccacgtgcactgcaggaccggagcgacacatgtcttccctgaagggtgttcagtacaaggcgtgtcagtttgtggatcagttgatccaagttactccttgtctaacctgactgacatatatttgaatactgtggttttctttcttttttttctatttgctgcccttcctggaggcagtgggttccagaagccaactgattgtccccctgccaagtcaccaagggaagctgctaagctgcttagtcccctcggtcctgcttgtagggtcttcctgattgtcaacagctgtctgggatgcttcagtctcctaaaactggaaacgcagggtgcgagcagcacacactgcctcccgccactgccagccggagtgagcggcccgagagtctctgcaggttcccctgggggctgggggccgctgaggcctaatatcaagagccaggaatgtcatgtacatggaggtgcctacggacgtgcctggtgtggtttgcaggtaggatggatgttcactgtttgaccgggtggggtatccttcctctctgcagtctccttcccagtatgcgtaaacacccttatagttctaattgtgttgatatttctgttctttctgaattgagagaaaatcccattcgttgtctgcagatttggaagtttgatgaggaatttggttcttgaaacatctgtctttttttttttttttgagacagagtatctctctgttgcccaggctgcagtgcagtggcgcgatctcagctccctgcaacctccacctcctgggttcaagcaattctctgcctcagcctcctgagtagctgggattccaggcacccgccaccacgcctggcttatttttgtatttttagtagagatggggtttcaccatcttggccaggctggtcttgaactcctgatctcatgatccacccgcctcagcttcccaaagtgctgggattacaggtgtgagccaccctgcctggccaaaacatttgtcatctttataaatggtcagaatagaaaagttagctctgccagtatcttcaattacttattacaagaatgtctttcatcatcttacttggagcattttccaatgactggctcttgagagccccaggcagggccccgagcaagtttttctaagtgccaaggccagcaaagtctgaactggccgcactcattaagtccctcatttggcaaaacaaaacagggcctggggcacccctggttcctggccttataggtcagtcaactggctgagaaatggtcaagaaaagaaacaatgacccttctgtggatgtgagtggatgatggactctggcctgtgtctactctcctgatgtgtagcccaccaacagtaatagaagtagagggtagggggttttgccaaggctaaggcttcaggtacttgctaacagttatagcagctgggtcactgtcatctggacttaccagttcatgccagtgtccctgtgacttatgcatagtgtgcgccacagccctctagaggtacctggagcccggactgccaggctggaggctctggggtactgaaggtgagctgtctgggcaaactattaagaacaagacgaactgttcacaatggagcttctcccacagatggggagctctgtgaggccttcacctgggtgcatgttggacttccattgctgttgctgttgtccctagacaagcccgttagcaagaagcaccggcaggggagccatgcactccataggcttgggatcacccccgggaaagcgatcttccccgggctaccacccccagctgcagttctgtgttagtgcatccttcaaagctaggagaattctagggtgaccagtgagctaatgttgagtgagcaggtattgacttgaacacactgcaggcctttggctgtctcatgctgtccttactcttcttgggaacagtgagtcactcagctggccagggtggggatgcatcctggtgaagagacagctttccctgaagatgctacagaaagttactgtcagatttcatttgtttctgtttcctgagatcaactaacagaagaatctaatggtgagagtgtcttcattcatgttttacgttttatcaaggcacactggaaagggaattatgtggctgacttcccttggccttcccaagagaagattctgttcttatgtcagtgtggcttctggaagtgtctcctatcctcccatcctccaggcctgtggtgtgacttctgccccgaagttcctactatagtgagtcatctggggagaggccactgaaaagaggccttcccttcccatttcctcccctgcctccttagaacacactctaagtcagaacttaatctaagaagaaggaagctggaccaggaaccttggaagtcagccagccctagaacagtcagcctaaattttggccgtaatggcttttttggttttttgttttgtttctgagatggagtctcactccgttgccaggctggagtgctgtggcgctatctcagcttaccgaatcctccgactccctggttcaagcgattgtcctgcctcagcctccggagtagctgggattacaggcatgcaccaccacacccagctaatttttgtatttttagtagagacggggtttcaccgtgttgtccaggatggtctccatctcctgacctcatgatgtgcccacttcggccttccaaagtggccgcaaagtggcccacttcggccaaagtgcacttcggccttccaaagtgcattacaggcgtgagccaccacgcccggcctggccttttttttttttttcttttgagacacagtttcactcgttgcccaggctggagtgcagtggcgcaatctcggctcactgcaacttctgcctcctaggttcaagcagttctcctgcctcagcctcccaagtagttgggattacgggcatgcaccaccatgcctggataattttttcttatttttagtagagacaggatttcatcatgttggccacgctggtttcgaactcctgaccacatgtggtccacccaccttggcctcaattatgtgcattttggtatatttacttgtatttcaacatcttgtgagtttgaaaaacctgaaaggccagaatgcttccttttatttctcaccatttgggcagcacctaagtggttttgtaaaatgcagcatctggtgctgtgggtctctctcaggccttgagggacacttccttcctccccactcgcctcctctccactagactttggttcctagagggcgtggggccgggtctgaggttcttgcctgccttccctcccattggtctttggttgctcatccctctaactgcaccccttcttggtccttcctccacagacttcagataatagataagtcattagcaaaccagaccgaatctttagggtgaagagctccccaaagccatctggtgaggtcattgtggggaccagggactgattatttgtcacctggatcacaaagatgggactgtctgctcaggctggtggtgacaggatcctgacccgtggtcctctcccgctccctctgctccaccaggacacatgtataggacactgtgctgtgtgcagtggagaaatctccctgggccaggggaaagttcagacagtgcctctagattgtgttttgcctcctccaatgtagagttgacatctggaccccagagcccagcagggctttctgtcagacatgctagggtggtagaaatgggccctccaggtccccctgcagtgcactgggcagagacctccggaaagccggcagcgggagcgcttcctgggcagcttcccccagcacagtgttcccaaaccagtccatccggaaaacagtctgtacagcaaatgctgtgtgagatcttaggcttttcactttttttgttttgttttgtttttgaaagaaagaaaaaaatacaattaacaagcctcttttgtaaatgggtttcctttctatgtataaaatcgtggtggtcccttgtttttacatgttcatgctgtgtaattttgagatgttactgagatatgttctgaacataatgtgcatttttttctgtacagatgaaatgggagaatttaataaagagtttgcaggtttttacttgttaaaaaaaaaaaa

SEQ ID NO: 538 - DNA, 8267 bp, Homo sapiens
atttaaatacgcggcgccggcgagtgcgtcgagctcgccgcggactcaagatggcggcgtgtggacgtgtacggaggatgttccgcttgtcggcggcgctgcatctgctgctgctattcgcggccggggccgagaaactccccggccagggcgtccacagccagggccagggtcccggggccaactttgtgtccttcgtagggcaggccggaggcggcggcccggcgggtcagcagctgccccagctgcctcagtcatcgcagcttcagcagcaacagcagcagcagcaacagcaacagcagcctcagccgccgcagccgcctttcccggcgggtgggcctccggcccggcggggaggagcgggggctggtgggggctggaagctggcggaggaagagtcctgcagggaggacgtgacccgcgtgtgccctaagcacacctggagcaacaacctggcggtgctcgagtgcctgcaggatgtgagggagttgttgtggaattataagctgaacctaactacagatcccaaatttgaatctgtggccagagaggtttgcaaatctactataacagagattaaagaatgtgctgatgaaccggttggaaaaggttacatggtttcctgcttggtggatcaccgaggcaacatcactgagtatcagtgtcaccagtacattaccaagatgacggccatcatttttagtgattaccgtttaatctgtggcttcatggatgactgcaaaaatgacatcaacattctgaaatgtggcagtattcggcttggagaaaaggatgcacattcacaaggtgaggtggtatcatgcttggagaaaggcctggtgaaagaagcagaagaaagagaacccaagattcaagtttctgaactctgcaagaaagccattctccgggtggctgagctgtcatcggatgactttcacttagaccggcatttatattttgcttgccgagatgatcgggagcgtttttgtgaaaatacacaagctggtgagggcagagtgtataagtgcctctttaaccataaatttgaagaatccatgagtgaaaagtgtcgagaagcacttacaacccgccaaaagctgattgcccaggattataaagtcagttattcattggccaaatcctgtaaaagtgacttgaagaaataccggtgcaatgtggaaaaccttccgcgatcgcgtgaagccaggctctcctacttgttaatgtgcctggagtcagctgtacacagagggcgacaagtcagcagtgagtgccagggggagatgctggattaccgacgcatgttgatggaagacttttctctgagccctgagatcatcctaagctgtcggggggagattgaacaccattgttccggattacatcgaaaagggcggaccctacactgtctgatgaaagtagttcgaggggagaaggggaaccttggaatgaactgccagcaggcgcttcaaacactgattcaggagactgaccctggtgcagattaccgcattgatcgagctttgaatgaagcttgtgaatctgtaatccagacagcctgcaaacatataagatctggagacccaatgatcttgtcgtgcctgatggaacatttatacacagagaagatggtagaagactgtgaacaccgtctcttagagctgcagtatttcatctcccgggattggaagctggaccctgtcctgtaccgcaagtgccagggagacgcttctcgtctttgccacacccacggttggaatgagaccagtgaatttatgcctcagggagctgtgttctcttgtttatacagacacgcctaccgcactgaggaacagggaaggaggctctcacgggagtgccgagctgaagtccaaaggatcctacaccagcgtgccatggatgtcaagctggatcctgccctccaggataagtgcctgattgatctgggaaaatggtgcagtgagaaaacagagactggacaggagctggagtgccttcaggaccatctggatgacttggtggtggagtgtagagatatagttggcaacctcactgagttagaatcagaggatattcaaatagaagccttgctgatgagagcctgtgagcccataattcagaacttctgccacgatgtggcagataaccagatagactctggggacctgatggagtgtctgatacagaacaaacaccagaaggacatgaacgagaagtgtgccatcggagttacccacttccagctggtgcagatgaaggattttcggttttcttacaagtttaaaatggcctgcaaggaggacgtgttgaagctttgcccaaacataaaaaagaaggtggacgtggtgatctgcctgagcacgaccgtgcgcaatgacactctgcaggaagccaaggagcacagggtgtccctgaagtgccgcaggcagctccgtgtggaggagctggagatgacggaggacatccgcttggagccagatctatacgaagcctgcaagagtgacatcaaaaacttctgttccgctgtgcaatatggcaacgctcagattatcgaatgtctgaaagaaaacaagaagcagctaagcacccgctgccaccaaaaagtatttaagctgcaggagacagagatgatggacccagagctagactacaccctcatgagggtctgcaagcagatgataaagaggttctgtccggaagcagattctaaaaccatgttgcagtgcttgaagcaaaataaaaacagtgaattgatggatcccaaatgcaaacagatgataaccaagcgccagatcacccagaacacagattaccgcttaaaccccatgttaagaaaagcctgtaaagctgacattcctaaattctgtcacggtatcctgactaaggccaaggatgattcagaattagaaggacaagtcatctcttgcctgaagctgagatatgctgaccagcgcctgtcttcagactgtgaagaccagatccgaatcattatccaggagtccgccctggactaccgcctggatcctcagctccagctgcactgctcagacgagatctccagtctatgtgctgaagaagcagcagcccaagagcagacaggtcaggtggaggagtgcctcaaggtcaacctgctcaagatcaaaacagaattgtgtaaaaaggaagtgctaaacatgctgaaggaaagcaaagcagacatctttgttgacccggtacttcatactgcttgtgccctggacattaaacaccactgcgcagccatcacccctggccgcgggcgtcaaatgtcctgtctcatggaagcactggaggataagcgggtgaggttacagcccgagtgcaaaaagcgcctcaatgaccggattgagatgtggagttacgcagcaaaggtggccccagcagatggcttctctgatcttgccatgcaagtaatgacgtctccatctaagaactacattctctctgtgatcagtgggagcatctgtatattgttcctgattggcctgatgtgtggacggatcaccaagcgagtgacacgagagctcaaggacaggctacaatacaggtcagagacaatggcttataaaggtttagtgtggtctcaggatgtgacaggcagtccagcctgacctttctgcacactccagacaaacttcccagacaagctcctttgtgcctctacgtggagagggtgtggaaagttatcacattaaaagatggaggatttgctctgttttttttctttctgtccatttgctgcgtgtacccactctagtaggcattggctaaatgttgtattttggcgattcatcaacctttgcagaatatgggctttatagaagcaatattcttggccatcccgcctcattcctccagtgtggagatgacaagtctgggtgtgagagggaggggtccgggcatcatggttcagcgtggcactcctttggttgagtttggggcatgagatcacagtggctgcacaagagagcagtgtgtacagtaggagagacatttatgtaatatatattttattaacctgttagatgtccacaaagtattataaatcacgtgcctaaaactgtccatgtagaccaaggcctgccctcggcgccccccactcttgcctctgctctgcacagtccacgtgcactgcaggaccggagcgacacatgtcttccctgaagggtgttcagtacaaggcgtgtcagtttgtggatcagttgatccaagttactccttgtctaacctgactgacatatatttgaatactgtggttttctttcttttttttctatttgctgcccttcctggaggcagtgggttccagaagccaactgattgtccccctgccaagtcaccaagggaagctgctaagctgcttagtcccctcggtcctgcttgtagggtcttcctgattgtcaacagctgtctgggatgcttcagtctcctaaaactggaaacgcagggtgcgagcagcacacactgcctcccgccactgccagccggagtgagcggcccgagagtctctgcaggttcccctgggggctgggggccgctgaggcctaatatcaagagccaggaatgtcatgtacatggaggtgcctacggacgtgcctggtgtggtttgcaggtaggatggatgttcactgtttgaccgggtggggtatccttcctctctgcagtctccttcccagtatgcgtaaacacccttatagttctaattgtgttgatatttctgttctttctgaattgagagaaaatcccattcgttgtctgcagatttggaagtttgatgaggaatttggttcttgaaacatctgtctttttttttttttttgagacagagtatctctctgttgcccaggctgcagtgcagtggcgcgatctcagctccctgcaacctccacctcctgggttcaagcaattctctgcctcagcctcctgagtagctgggattccaggcacccgccaccacgcctggcttatttttgtatttttagtagagatggggtttcaccatcttggccaggctggtcttgaactcctgatctcatgatccacccgcctcagcttcccaaagtgctgggattacaggtgtgagccaccctgcctggccaaaacatttgtcatctttataaatggtcagaatagaaaagttagctctgccagtatcttcaattacttattacaagaatgtctttcatcatcttacttggagcattttccaatgactggctcttgagagccccaggcagggccccgagcaagtttttctaagtgccaaggccagcaaagtctgaactggccgcactcattaagtccctcatttggcaaaacaaaacagggcctggggcacccctggttcctggccttataggtcagtcaactggctgagaaatggtcaagaaaagaaacaatgacccttctgtggatgtgagtggatgatggactctggcctgtgtctactctcctgatgtgtagcccaccaacagtaatagaagtagagggtagggggttttgccaaggctaaggcttcaggtacttgctaacagttatagcagctgggtcactgtcatctggacttaccagttcatgccagtgtccctgtgacttatgcatagtgtgcgccacagccctctagaggtacctggagcccggactgccaggctggaggctctggggtactgaaggtgagctgtctgggcaaactattaagaacaagacgaactgttcacaatggagcttctcccacagatggggagctctgtgaggccttcacctgggtgcatgttggacttccattgctgttgctgttgtccctagacaagcccgttagcaagaagcaccggcaggggagccatgcactccataggcttgggatcacccccgggaaagcgatcttccccgggctaccacccccagctgcagttctgtgttagtgcatccttcaaagctaggagaattctagggtgaccagtgagctaatgttgagtgagcaggtattgacttgaacacactgcaggcctttggctgtctcatgctgtccttactcttcttgggaacagtgagtcactcagctggccagggtggggatgcatcctggtgaagagacagctttccctgaagatgctacagaaagttactgtcagatttcatttgtttctgtttcctgagatcaactaacagaagaatctaatggtgagagtgtcttcattcatgttttacgttttatcaaggcacactggaaagggaattatgtggctgacttcccttggccttcccaagagaagattctgttcttatgtcagtgtggcttctggaagtgtctcctatcctcccatcctccaggcctgtggtgtgacttctgccccgaagttcctactatagtgagtcatctggggagaggccactgaaaagaggccttcccttcccatttcctcccctgcctccttagaacacactctaagtcagaacttaatctaagaagaaggaagctggaccaggaaccttggaagtcagccagccctagaacagtcagcctaaattttggccgtaatggcttttttggttttttgttttgtttctgagatggagtctcactccgttgccaggctggagtgctgtggcgctatctcagcttaccgaatcctccgactccctggttcaagcgattgtcctgcctcagcctccggagtagctgggattacaggcatgcaccaccacacccagctaatttttgtatttttagtagagacggggtttcaccgtgttgtccaggatggtctccatctcctgacctcatgatgtgcccacttcggccttccaaagtggccgcaaagtggcccacttcggccaaagtgcacttcggccttccaaagtgcattacaggcgtgagccaccacgcccggcctggccttttttttttttttcttttgagacacagtttcactcgttgcccaggctggagtgcagtggcgcaatctcggctcactgcaacttctgcctcctaggttcaagcagttctcctgcctcagcctcccaagtagttgggattacgggcatgcaccaccatgcctggataattttttcttatttttagtagagacaggatttcatcatgttggccacgctggtttcgaactcctgaccacatgtggtccacccaccttggcctcaattatgtgcattttggtatatttacttgtatttcaacatcttgtgagtttgaaaaacctgaaaggccagaatgcttccttttatttctcaccatttgggcagcacctaagtggttttgtaaaatgcagcatctggtgctgtgggtctctctcaggccttgagggacacttccttcctccccactcgcctcctctccactagactttggttcctagagggcgtggggccgggtctgaggttcttgcctgccttccctcccattggtctttggttgctcatccctctaactgcaccccttcttggtccttcctccacagacttcagataatagataagtcattagcaaaccagaccgaatctttagggtgaagagctccccaaagccatctggtgaggtcattgtggggaccagggactgattatttgtcacctggatcacaaagatgggactgtctgctcaggctggtggtgacaggatcctgacccgtggtcctctcccgctccctctgctccaccaggacacatgtataggacactgtgctgtgtgcagtggagaaatctccctgggccaggggaaagttcagacagtgcctctagattgtgttttgcctcctccaatgtagagttgacatctggaccccagagcccagcagggctttctgtcagacatgctagggtggtagaaatgggccctccaggtccccctgcagtgcactgggcagagacctccggaaagccggcagcgggagcgcttcctgggcagcttcccccagcacagtgttcccaaaccagtccatccggaaaacagtctgtacagcaaatgctgtgtgagatcttaggcttttcactttttttgttttgttttgtttttgaaagaaagaaaaaaatacaattaacaagcctcttttgtaaatgggtttcctttctatgtataaaatcgtggtggtcccttgtttttacatgttcatgctgtgtaattttgagatgttactgagatatgttctgaacataatgtgcatttttttctgtacagatgaaatgggagaatttaataaagagtttgcaggtttttacttgttaaaaaaaaaaaa

SEQ ID NO: 539 - DNA, 9339 bp, Homo sapiens
atttaaatacgcggcgccggcgagtgcgtcgagctcgccgcggactcaagatggcggcgtgtggacgtgtacggaggatgttccgcttgtcggcggcgctgcatctgctgctgctattcgcggccggggccgagaaactccccggccagggcgtccacagccagggccagggtcccggggccaactttgtgtccttcgtagggcaggccggaggcggcggcccggcgggtcagcagctgccccagctgcctcagtcatcgcagcttcagcagcaacagcagcagcagcaacagcaacagcagcctcagccgccgcagccgcctttcccggcgggtgggcctccggcccggcggggaggagcgggggctggtgggggctggaagctggcggaggaagagtcctgcagggaggacgtgacccgcgtgtgccctaagcacacctggagcaacaacctggcggtgctcgagtgcctgcaggatgtgagggagcctgaaaatgaaatttcttcagactgcaatcatttgttgtggaattataagctgaacctaactacagatcccaaatttgaatctgtggccagagaggtttgcaaatctactataacagagattaaagaatgtgctgatgaaccggttggaaaaggttacatggtttcctgcttggtggatcaccgaggcaacatcactgagtatcagtgtcaccagtacattaccaagatgacggccatcatttttagtgattaccgtttaatctgtggcttcatggatgactgcaaaaatgacatcaacattctgaaatgtggcagtattcggcttggagaaaaggatgcacattcacaaggtgaggtggtatcatgcttggagaaaggcctggtgaaagaagcagaagaaagagaacccaagattcaagtttctgaactctgcaagaaagccattctccgggtggctgagctgtcatcggatgactttcacttagaccggcatttatattttgcttgccgagatgatcgggagcgtttttgtgaaaatacacaagctggtgagggcagagtgtataagtgcctctttaaccataaatttgaagaatccatgagtgaaaagtgtcgagaagcacttacaacccgccaaaagctgattgcccaggattataaagtcagttattcattggccaaatcctgtaaaagtgacttgaagaaataccggtgcaatgtggaaaaccttccgcgatcgcgtgaagccaggctctcctacttgttaatgtgcctggagtcagctgtacacagagggcgacaagtcagcagtgagtgccagggggagatgctggattaccgacgcatgttgatggaagacttttctctgagccctgagatcatcctaagctgtcggggggagattgaacaccattgttccggattacatcgaaaagggcggaccctacactgtctgatgaaagtagttcgaggggagaaggggaaccttggaatgaactgccagcaggcgcttcaaacactgattcaggagactgaccctggtgcagattaccgcattgatcgagctttgaatgaagcttgtgaatctgtaatccagacagcctgcaaacatataagatctggagacccaatgatcttgtcgtgcctgatggaacatttatacacagagaagatggtagaagactgtgaacaccgtctcttagagctgcagtatttcatctcccgggattggaagctggaccctgtcctgtaccgcaagtgccagggagacgcttctcgtctttgccacacccacggttggaatgagaccagtgaatttatgcctcagggagctgtgttctcttgtttatacagacacgcctaccgcactgaggaacagggaaggaggctctcacgggagtgccgagctgaagtccaaaggatcctacaccagcgtgccatggatgtcaagctggatcctgccctccaggataagtgcctgattgatctgggaaaatggtgcagtgagaaaacagagactggacaggagctggagtgccttcaggaccatctggatgacttggtggtggagtgtagagatatagttggcaacctcactgagttagaatcagaggatattcaaatagaagccttgctgatgagagcctgtgagcccataattcagaacttctgccacgatgtggcagataaccagatagactctggggacctgatggagtgtctgatacagaacaaacaccagaaggacatgaacgagaagtgtgccatcggagttacccacttccagctggtgcagatgaaggattttcggttttcttacaagtttaaaatggcctgcaaggaggacgtgttgaagctttgcccaaacataaaaaagaaggtggacgtggtgatctgcctgagcacgaccgtgcgcaatgacactctgcaggaagccaaggagcacagggtgtccctgaagtgccgcaggcagctccgtgtggaggagctggagatgacggaggacatccgcttggagccagatctatacgaagcctgcaagagtgacatcaaaaacttctgttccgctgtgcaatatggcaacgctcagattatcgaatgtctgaaagaaaacaagaagcagctaagcacccgctgccaccaaaaagtatttaagctgcaggagacagagatgatggacccagagctagactacaccctcatgagggtctgcaagcagatgataaagaggttctgtccggaagcagattctaaaaccatgttgcagtgcttgaagcaaaataaaaacagtgaattgatggatcccaaatgcaaacagatgataaccaagcgccagatcacccagaacacagattaccgcttaaaccccatgttaagaaaagcctgtaaagctgacattcctaaattctgtcacggtatcctgactaaggccaaggatgattcagaattagaaggacaagtcatctcttgcctgaagctgagatatgctgaccagcgcctgtcttcagactgtgaagaccagatccgaatcattatccaggagtccgccctggactaccgcctggatcctcagctccagctgcactgctcagacgagatctccagtctatgtgctgaagaagcagcagcccaagagcagacaggtcaggtggaggagtgcctcaaggtcaacctgctcaagatcaaaacagaattgtgtaaaaaggaagtgctaaacatgctgaaggaaagcaaagcagacatctttgttgacccggtacttcatactgcttgtgccctggacattaaacaccactgcgcagccatcacccctggccgcgggcgtcaaatgtcctgtctcatggaagcactggaggataagcgggtgaggttacagcccgagtgcaaaaagcgcctcaatgaccggattgagatgtggagttacgcagcaaaggtggccccagcagatggcttctctgatcttgccatgcaagtaatgacgtctccatctaagaactacattctctctgtgatcagtgggagcatctgtatattgttcctgattggcctgatgtgtggacggatcaccaagcgagtgacacgagagctcaaggacaggtagagccaccttgaccaccaaaggaactacctatccagtgcccagtttgtacagccctcttgtatagcatccccactcacctcgctcttctcagaagtgacaccaaccccgtgttagagcattagcagatgtccactgcgttgtcccatccagcctccactcgtgtccatggtgtcctcctcctcctcaccgtgcagcagcagcagctggtcgctggggttactgcctttgtttggcaaacttgggtttacctgcctgtagacaagtctctctcataccaacagaacttccggtacttccagaaccaactcacctgacctgcaactcaaaggcttttttaagaaaaccaccaaaaaaaaaaatttttttaaagaaaaaaatgtatatagtaacgcatctcctccaggcttgatttgggcaatggggttatgtctttcatatgactgtgtaaaacaaagacaggacttggaggggaagcacaccacccagtgtgccatgactgaggtgtctcgttcatctctcagaagcaccttggggcctcgccagggccgtggtcttcaccgaggcgtgggtgggcagccgttccccaggctgtgtggggtcctgctttcttctgctgagacagtgacgctttccagtttccaccctaatcagccactgctggtcacagccccacagccatgggtatttctgtggtctcctcgcttcattgaagcaaagcatgagccttcctagacaagggcagctggggaggggaagggaccggaagtttgtgaagttgaacagtccatccatctgcactgagaggctggatcctgagtcccggggcagcaggatcccaggaaccttcctcctccagggcagcacaggactcagccatgtctggaccggccctgctgaggctacagtcactctggaagctctgcgcttcatcaggaggcaggactgtggcgggaggggtccttgaagatgggtgtggggagcagtgggtcaggaagtgggagccagaggtttgactcactttgctttatttttcaggctacaatacaggtcagagacaatggcttataaaggtttagtgtggtctcaggatgtgacaggcagtccagcctgacctttctgcacactccagacaaacttcccagacaagctcctttgtgcctctacgtggagagggtgtggaaagttatcacattaaaagatggaggatttgctctgttttttttctttctgtccatttgctgcgtgtacccactctagtaggcattggctaaatgttgtattttggcgattcatcaacctttgcagaatatgggctttatagaagcaatattcttggccatcccgcctcattcctccagtgtggagatgacaagtctgggtgtgagagggaggggtccgggcatcatggttcagcgtggcactcctttggttgagtttggggcatgagatcacagtggctgcacaagagagcagtgtgtacagtaggagagacatttatgtaatatatattttattaacctgttagatgtccacaaagtattataaatcacgtgcctaaaactgtccatgtagaccaaggcctgccctcggcgccccccactcttgcctctgctctgcacagtccacgtgcactgcaggaccggagcgacacatgtcttccctgaagggtgttcagtacaaggcgtgtcagtttgtggatcagttgatccaagttactccttgtctaacctgactgacatatatttgaatactgtggttttctttcttttttttctatttgctgcccttcctggaggcagtgggttccagaagccaactgattgtccccctgccaagtcaccaagggaagctgctaagctgcttagtcccctcggtcctgcttgtagggtcttcctgattgtcaacagctgtctgggatgcttcagtctcctaaaactggaaacgcagggtgcgagcagcacacactgcctcccgccactgccagccggagtgagcggcccgagagtctctgcaggttcccctgggggctgggggccgctgaggcctaatatcaagagccaggaatgtcatgtacatggaggtgcctacggacgtgcctggtgtggtttgcaggtaggatggatgttcactgtttgaccgggtggggtatccttcctctctgcagtctccttcccagtatgcgtaaacacccttatagttctaattgtgttgatatttctgttctttctgaattgagagaaaatcccattcgttgtctgcagatttggaagtttgatgaggaatttggttcttgaaacatctgtctttttttttttttttgagacagagtatctctctgttgcccaggctgcagtgcagtggcgcgatctcagctccctgcaacctccacctcctgggttcaagcaattctctgcctcagcctcctgagtagctgggattccaggcacccgccaccacgcctggcttatttttgtatttttagtagagatggggtttcaccatcttggccaggctggtcttgaactcctgatctcatgatccacccgcctcagcttcccaaagtgctgggattacaggtgtgagccaccctgcctggccaaaacatttgtcatctttataaatggtcagaatagaaaagttagctctgccagtatcttcaattacttattacaagaatgtctttcatcatcttacttggagcattttccaatgactggctcttgagagccccaggcagggccccgagcaagtttttctaagtgccaaggccagcaaagtctgaactggccgcactcattaagtccctcatttggcaaaacaaaacagggcctggggcacccctggttcctggccttataggtcagtcaactggctgagaaatggtcaagaaaagaaacaatgacccttctgtggatgtgagtggatgatggactctggcctgtgtctactctcctgatgtgtagcccaccaacagtaatagaagtagagggtagggggttttgccaaggctaaggcttcaggtacttgctaacagttatagcagctgggtcactgtcatctggacttaccagttcatgccagtgtccctgtgacttatgcatagtgtgcgccacagccctctagaggtacctggagcccggactgccaggctggaggctctggggtactgaaggtgagctgtctgggcaaactattaagaacaagacgaactgttcacaatggagcttctcccacagatggggagctctgtgaggccttcacctgggtgcatgttggacttccattgctgttgctgttgtccctagacaagcccgttagcaagaagcaccggcaggggagccatgcactccataggcttgggatcacccccgggaaagcgatcttccccgggctaccacccccagctgcagttctgtgttagtgcatccttcaaagctaggagaattctagggtgaccagtgagctaatgttgagtgagcaggtattgacttgaacacactgcaggcctttggctgtctcatgctgtccttactcttcttgggaacagtgagtcactcagctggccagggtggggatgcatcctggtgaagagacagctttccctgaagatgctacagaaagttactgtcagatttcatttgtttctgtttcctgagatcaactaacagaagaatctaatggtgagagtgtcttcattcatgttttacgttttatcaaggcacactggaaagggaattatgtggctgacttcccttggccttcccaagagaagattctgttcttatgtcagtgtggcttctggaagtgtctcctatcctcccatcctccaggcctgtggtgtgacttctgccccgaagttcctactatagtgagtcatctggggagaggccactgaaaagaggccttcccttcccatttcctcccctgcctccttagaacacactctaagtcagaacttaatctaagaagaaggaagctggaccaggaaccttggaagtcagccagccctagaacagtcagcctaaattttggccgtaatggcttttttggttttttgttttgtttctgagatggagtctcactccgttgccaggctggagtgctgtggcgctatctcagcttaccgaatcctccgactccctggttcaagcgattgtcctgcctcagcctccggagtagctgggattacaggcatgcaccaccacacccagctaatttttgtatttttagtagagacggggtttcaccgtgttgtccaggatggtctccatctcctgacctcatgatgtgcccacttcggccttccaaagtggccgcaaagtggcccacttcggccaaagtgcacttcggccttccaaagtgcattacaggcgtgagccaccacgcccggcctggccttttttttttttttcttttgagacacagtttcactcgttgcccaggctggagtgcagtggcgcaatctcggctcactgcaacttctgcctcctaggttcaagcagttctcctgcctcagcctcccaagtagttgggattacgggcatgcaccaccatgcctggataattttttcttatttttagtagagacaggatttcatcatgttggccacgctggtttcgaactcctgaccacatgtggtccacccaccttggcctcaattatgtgcattttggtatatttacttgtatttcaacatcttgtgagtttgaaaaacctgaaaggccagaatgcttccttttatttctcaccatttgggcagcacctaagtggttttgtaaaatgcagcatctggtgctgtgggtctctctcaggccttgagggacacttccttcctccccactcgcctcctctccactagactttggttcctagagggcgtggggccgggtctgaggttcttgcctgccttccctcccattggtctttggttgctcatccctctaactgcaccccttcttggtccttcctccacagacttcagataatagataagtcattagcaaaccagaccgaatctttagggtgaagagctccccaaagccatctggtgaggtcattgtggggaccagggactgattatttgtcacctggatcacaaagatgggactgtctgctcaggctggtggtgacaggatcctgacccgtggtcctctcccgctccctctgctccaccaggacacatgtataggacactgtgctgtgtgcagtggagaaatctccctgggccaggggaaagttcagacagtgcctctagattgtgttttgcctcctccaatgtagagttgacatctggaccccagagcccagcagggctttctgtcagacatgctagggtggtagaaatgggccctccaggtccccctgcagtgcactgggcagagacctccggaaagccggcagcgggagcgcttcctgggcagcttcccccagcacagtgttcccaaaccagtccatccggaaaacagtctgtacagcaaatgctgtgtgagatcttaggcttttcactttttttgttttgttttgtttttgaaagaaagaaaaaaatacaattaacaagcctcttttgtaaatgggtttcctttctatgtataaaatcgtggtggtcccttgtttttacatgttcatgctgtgtaattttgagatgttactgagatatgttctgaacataatgtgcatttttttctgtacagatgaaatgggagaatttaataaagagtttgcaggtttttacttgttaaaaaaaaaaaa

SEQ ID NO: 540 - DNA, 9448 bp, Homo sapiens
atttaaatacgcggcgccggcgagtgcgtcgagctcgccgcggactcaagatggcggcgtgtggacgtgtacggaggatgttccgcttgtcggcggcgctgcatctgctgctgctattcgcggccggggccgagaaactccccggccagggcgtccacagccagggccagggtcccggggccaactttgtgtccttcgtagggcaggccggaggcggcggcccggcgggtcagcagctgccccagctgcctcagtcatcgcagcttcagcagcaacagcagcagcagcaacagcaacagcagcctcagccgccgcagccgcctttcccggcgggtgggcctccggcccggcggggaggagcgggggctggtgggggctggaagctggcggaggaagagtcctgcagggaggacgtgacccgcgtgtgccctaagcacacctggagcaacaacctggcggtgctcgagtgcctgcaggatgtgagggagcctgaaaatgaaatttcttcagactgcaatcatttgttgtggaattataagctgaacctaactacagatcccaaatttgaatctgtggccagagaggtttgcaaatctactataacagagattaaagaatgtgctgatgaaccggttggaaaaggttacatggtttcctgcttggtggatcaccgaggcaacatcactgagtatcagtgtcaccagtacattaccaagatgacggccatcatttttagtgattaccgtttaatctgtggcttcatggatgactgcaaaaatgacatcaacattctgaaatgtggcagtattcggcttggagaaaaggatgcacattcacaaggtgaggtggtatcatgcttggagaaaggcctggtgaaagaagcagaagaaagagaacccaagattcaagtttctgaactctgcaagaaagccattctccgggtggctgagctgtcatcggatgactttcacttagaccggcatttatattttgcttgccgagatgatcgggagcgtttttgtgaaaatacacaagctggtgagggcagagtgtataagtgcctctttaaccataaatttgaagaatccatgagtgaaaagtgtcgagaagcacttacaacccgccaaaagctgattgcccaggattataaagtcagttattcattggccaaatcctgtaaaagtgacttgaagaaataccggtgcaatgtggaaaaccttccgcgatcgcgtgaagccaggctctcctacttgttaatgtgcctggagtcagctgtacacagagggcgacaagtcagcagtgagtgccagggggagatgctggattaccgacgcatgttgatggaagacttttctctgagccctgagatcatcctaagctgtcggggggagattgaacaccattgttccggattacatcgaaaagggcggaccctacactgtctgatgaaagtagttcgaggggagaaggggaaccttggaatgaactgccagcaggcgcttcaaacactgattcaggagactgaccctggtgcagattaccgcattgatcgagctttgaatgaagcttgtgaatctgtaatccagacagcctgcaaacatataagatctggagacccaatgatcttgtcgtgcctgatggaacatttatacacagagaagatggtagaagactgtgaacaccgtctcttagagctgcagtatttcatctcccgggattggaagctggaccctgtcctgtaccgcaagtgccagggagacgcttctcgtctttgccacacccacggttggaatgagaccagtgaatttatgcctcagggagctgtgttctcttgtttatacagacacgcctaccgcactgaggaacagggaaggaggctctcacgggagtgccgagctgaagtccaaaggatcctacaccagcgtgccatggatgtcaagctggatcctgccctccaggataagtgcctgattgatctgggaaaatggtgcagtgagaaaacagagactggacaggagctggagtgccttcaggaccatctggatgacttggtggtggagtgtagagatatagttggcaacctcactgagttagaatcagaggccgaaagggaatatgtctttaaaaatttgcctttcaaagtataacggaggagcagttctatatttattctggggctatctacttcaaatactagaatcgtttccaaaagatattcaaatagaagccttgctgatgagagcctgtgagcccataattcagaacttctgccacgatgtggcagataaccagatagactctggggacctgatggagtgtctgatacagaacaaacaccagaaggacatgaacgagaagtgtgccatcggagttacccacttccagctggtgcagatgaaggattttcggttttcttacaagtttaaaatggcctgcaaggaggacgtgttgaagctttgcccaaacataaaaaagaaggtggacgtggtgatctgcctgagcacgaccgtgcgcaatgacactctgcaggaagccaaggagcacagggtgtccctgaagtgccgcaggcagctccgtgtggaggagctggagatgacggaggacatccgcttggagccagatctatacgaagcctgcaagagtgacatcaaaaacttctgttccgctgtgcaatatggcaacgctcagattatcgaatgtctgaaagaaaacaagaagcagctaagcacccgctgccaccaaaaagtatttaagctgcaggagacagagatgatggacccagagctagactacaccctcatgagggtctgcaagcagatgataaagaggttctgtccggaagcagattctaaaaccatgttgcagtgcttgaagcaaaataaaaacagtgaattgatggatcccaaatgcaaacagatgataaccaagcgccagatcacccagaacacagattaccgcttaaaccccatgttaagaaaagcctgtaaagctgacattcctaaattctgtcacggtatcctgactaaggccaaggatgattcagaattagaaggacaagtcatctcttgcctgaagctgagatatgctgaccagcgcctgtcttcagactgtgaagaccagatccgaatcattatccaggagtccgccctggactaccgcctggatcctcagctccagctgcactgctcagacgagatctccagtctatgtgctgaagaagcagcagcccaagagcagacaggtcaggtggaggagtgcctcaaggtcaacctgctcaagatcaaaacagaattgtgtaaaaaggaagtgctaaacatgctgaaggaaagcaaagcagacatctttgttgacccggtacttcatactgcttgtgccctggacattaaacaccactgcgcagccatcacccctggccgcgggcgtcaaatgtcctgtctcatggaagcactggaggataagcgggtgaggttacagcccgagtgcaaaaagcgcctcaatgaccggattgagatgtggagttacgcagcaaaggtggccccagcagatggcttctctgatcttgccatgcaagtaatgacgtctccatctaagaactacattctctctgtgatcagtgggagcatctgtatattgttcctgattggcctgatgtgtggacggatcaccaagcgagtgacacgagagctcaaggacaggtagagccaccttgaccaccaaaggaactacctatccagtgcccagtttgtacagccctcttgtatagcatccccactcacctcgctcttctcagaagtgacaccaaccccgtgttagagcattagcagatgtccactgcgttgtcccatccagcctccactcgtgtccatggtgtcctcctcctcctcaccgtgcagcagcagcagctggtcgctggggttactgcctttgtttggcaaacttgggtttacctgcctgtagacaagtctctctcataccaacagaacttccggtacttccagaaccaactcacctgacctgcaactcaaaggcttttttaagaaaaccaccaaaaaaaaaaatttttttaaagaaaaaaatgtatatagtaacgcatctcctccaggcttgatttgggcaatggggttatgtctttcatatgactgtgtaaaacaaagacaggacttggaggggaagcacaccacccagtgtgccatgactgaggtgtctcgttcatctctcagaagcaccttggggcctcgccagggccgtggtcttcaccgaggcgtgggtgggcagccgttccccaggctgtgtggggtcctgctttcttctgctgagacagtgacgctttccagtttccaccctaatcagccactgctggtcacagccccacagccatgggtatttctgtggtctcctcgcttcattgaagcaaagcatgagccttcctagacaagggcagctggggaggggaagggaccggaagtttgtgaagttgaacagtccatccatctgcactgagaggctggatcctgagtcccggggcagcaggatcccaggaaccttcctcctccagggcagcacaggactcagccatgtctggaccggccctgctgaggctacagtcactctggaagctctgcgcttcatcaggaggcaggactgtggcgggaggggtccttgaagatgggtgtggggagcagtgggtcaggaagtgggagccagaggtttgactcactttgctttatttttcaggctacaatacaggtcagagacaatggcttataaaggtttagtgtggtctcaggatgtgacaggcagtccagcctgacctttctgcacactccagacaaacttcccagacaagctcctttgtgcctctacgtggagagggtgtggaaagttatcacattaaaagatggaggatttgctctgttttttttctttctgtccatttgctgcgtgtacccactctagtaggcattggctaaatgttgtattttggcgattcatcaacctttgcagaatatgggctttatagaagcaatattcttggccatcccgcctcattcctccagtgtggagatgacaagtctgggtgtgagagggaggggtccgggcatcatggttcagcgtggcactcctttggttgagtttggggcatgagatcacagtggctgcacaagagagcagtgtgtacagtaggagagacatttatgtaatatatattttattaacctgttagatgtccacaaagtattataaatcacgtgcctaaaactgtccatgtagaccaaggcctgccctcggcgccccccactcttgcctctgctctgcacagtccacgtgcactgcaggaccggagcgacacatgtcttccctgaagggtgttcagtacaaggcgtgtcagtttgtggatcagttgatccaagttactccttgtctaacctgactgacatatatttgaatactgtggttttctttcttttttttctatttgctgcccttcctggaggcagtgggttccagaagccaactgattgtccccctgccaagtcaccaagggaagctgctaagctgcttagtcccctcggtcctgcttgtagggtcttcctgattgtcaacagctgtctgggatgcttcagtctcctaaaactggaaacgcagggtgcgagcagcacacactgcctcccgccactgccagccggagtgagcggcccgagagtctctgcaggttcccctgggggctgggggccgctgaggcctaatatcaagagccaggaatgtcatgtacatggaggtgcctacggacgtgcctggtgtggtttgcaggtaggatggatgttcactgtttgaccgggtggggtatccttcctctctgcagtctccttcccagtatgcgtaaacacccttatagttctaattgtgttgatatttctgttctttctgaattgagagaaaatcccattcgttgtctgcagatttggaagtttgatgaggaatttggttcttgaaacatctgtctttttttttttttttgagacagagtatctctctgttgcccaggctgcagtgcagtggcgcgatctcagctccctgcaacctccacctcctgggttcaagcaattctctgcctcagcctcctgagtagctgggattccaggcacccgccaccacgcctggcttatttttgtatttttagtagagatggggtttcaccatcttggccaggctggtcttgaactcctgatctcatgatccacccgcctcagcttcccaaagtgctgggattacaggtgtgagccaccctgcctggccaaaacatttgtcatctttataaatggtcagaatagaaaagttagctctgccagtatcttcaattacttattacaagaatgtctttcatcatcttacttggagcattttccaatgactggctcttgagagccccaggcagggccccgagcaagtttttctaagtgccaaggccagcaaagtctgaactggccgcactcattaagtccctcatttggcaaaacaaaacagggcctggggcacccctggttcctggccttataggtcagtcaactggctgagaaatggtcaagaaaagaaacaatgacccttctgtggatgtgagtggatgatggactctggcctgtgtctactctcctgatgtgtagcccaccaacagtaatagaagtagagggtagggggttttgccaaggctaaggcttcaggtacttgctaacagttatagcagctgggtcactgtcatctggacttaccagttcatgccagtgtccctgtgacttatgcatagtgtgcgccacagccctctagaggtacctggagcccggactgccaggctggaggctctggggtactgaaggtgagctgtctgggcaaactattaagaacaagacgaactgttcacaatggagcttctcccacagatggggagctctgtgaggccttcacctgggtgcatgttggacttccattgctgttgctgttgtccctagacaagcccgttagcaagaagcaccggcaggggagccatgcactccataggcttgggatcacccccgggaaagcgatcttccccgggctaccacccccagctgcagttctgtgttagtgcatccttcaaagctaggagaattctagggtgaccagtgagctaatgttgagtgagcaggtattgacttgaacacactgcaggcctttggctgtctcatgctgtccttactcttcttgggaacagtgagtcactcagctggccagggtggggatgcatcctggtgaagagacagctttccctgaagatgctacagaaagttactgtcagatttcatttgtttctgtttcctgagatcaactaacagaagaatctaatggtgagagtgtcttcattcatgttttacgttttatcaaggcacactggaaagggaattatgtggctgacttcccttggccttcccaagagaagattctgttcttatgtcagtgtggcttctggaagtgtctcctatcctcccatcctccaggcctgtggtgtgacttctgccccgaagttcctactatagtgagtcatctggggagaggccactgaaaagaggccttcccttcccatttcctcccctgcctccttagaacacactctaagtcagaacttaatctaagaagaaggaagctggaccaggaaccttggaagtcagccagccctagaacagtcagcctaaattttggccgtaatggcttttttggttttttgttttgtttctgagatggagtctcactccgttgccaggctggagtgctgtggcgctatctcagcttaccgaatcctccgactccctggttcaagcgattgtcctgcctcagcctccggagtagctgggattacaggcatgcaccaccacacccagctaatttttgtatttttagtagagacggggtttcaccgtgttgtccaggatggtctccatctcctgacctcatgatgtgcccacttcggccttccaaagtggccgcaaagtggcccacttcggccaaagtgcacttcggccttccaaagtgcattacaggcgtgagccaccacgcccggcctggccttttttttttttttcttttgagacacagtttcactcgttgcccaggctggagtgcagtggcgcaatctcggctcactgcaacttctgcctcctaggttcaagcagttctcctgcctcagcctcccaagtagttgggattacgggcatgcaccaccatgcctggataattttttcttatttttagtagagacaggatttcatcatgttggccacgctggtttcgaactcctgaccacatgtggtccacccaccttggcctcaattatgtgcattttggtatatttacttgtatttcaacatcttgtgagtttgaaaaacctgaaaggccagaatgcttccttttatttctcaccatttgggcagcacctaagtggttttgtaaaatgcagcatctggtgctgtgggtctctctcaggccttgagggacacttccttcctccccactcgcctcctctccactagactttggttcctagagggcgtggggccgggtctgaggttcttgcctgccttccctcccattggtctttggttgctcatccctctaactgcaccccttcttggtccttcctccacagacttcagataatagataagtcattagcaaaccagaccgaatctttagggtgaagagctccccaaagccatctggtgaggtcattgtggggaccagggactgattatttgtcacctggatcacaaagatgggactgtctgctcaggctggtggtgacaggatcctgacccgtggtcctctcccgctccctctgctccaccaggacacatgtataggacactgtgctgtgtgcagtggagaaatctccctgggccaggggaaagttcagacagtgcctctagattgtgttttgcctcctccaatgtagagttgacatctggaccccagagcccagcagggctttctgtcagacatgctagggtggtagaaatgggccctccaggtccccctgcagtgcactgggcagagacctccggaaagccggcagcgggagcgcttcctgggcagcttcccccagcacagtgttcccaaaccagtccatccggaaaacagtctgtacagcaaatgctgtgtgagatcttaggcttttcactttttttgttttgttttgtttttgaaagaaagaaaaaaatacaattaacaagcctcttttgtaaatgggtttcctttctatgtataaaatcgtggtggtcccttgtttttacatgttcatgctgtgtaattttgagatgttactgagatatgttctgaacataatgtgcatttttttctgtacagatgaaatgggagaatttaataaagagtttgcaggtttttacttgttaaaaaaaaaaaa

SEQ ID NO: 541 - DNA, 8336 bp, Homo sapiens
atttaaatacgcggcgccggcgagtgcgtcgagctcgccgcggactcaagatggcggcgtgtggacgtgtacggaggatgttccgcttgtcggcggcgctgcatctgctgctgctattcgcggccggggccgagaaactccccggccagggcgtccacagccagggccagggtcccggggccaactttgtgtccttcgtagggcaggccggaggcggcggcccggcgggtcagcagctgccccagctgcctcagtcatcgcagcttcagcagcaacagcagcagcagcaacagcaacagcagcctcagccgccgcagccgcctttcccggcgggtgggcctccggcccggcggggaggagcgggggctggtgggggctggaagctggcggaggaagagtcctgcagggaggacgtgacccgcgtgtgccctaagcacacctggagcaacaacctggcggtgctcgagtgcctgcaggatgtgagggagcctgaaaatgaaatttcttcagactgcaatcatttgttgtggaattataagctgaacctaactacagatcccaaatttgaatctgtggccagagaggtttgcaaatctactataacagagattaaagaatgtgctgatgaaccggttggaaaaggttacatggtttcctgcttggtggatcaccgaggcaacatcactgagtatcagtgtcaccagtacattaccaagatgacggccatcatttttagtgattaccgtttaatctgtggcttcatggatgactgcaaaaatgacatcaacattctgaaatgtggcagtattcggcttggagaaaaggatgcacattcacaagacacgcctaccgcactgaggaacagggaaggaggctctcacgggagtgccgagctgaagtccaaaggatcctacaccagcgtgccatggatgtcaagctggatcctgccctccaggataagtgcctgattgatctgggaaaatggtgcagtgagaaaacagagactggacaggagctggagtgccttcaggaccatctggatgacttggtggtggagtgtagagatatagttggcaacctcactgagttagaatcagaggatattcaaatagaagccttgctgatgagagcctgtgagcccataattcagaacttctgccacgatgtggcagataaccagatagactctggggacctgatggagtgtctgatacagaacaaacaccagaaggacatgaacgagaagtgtgccatcggagttacccacttccagctggtgcagatgaaggattttcggttttcttacaagtttaaaatggcctgcaaggaggacgtgttgaagctttgcccaaacataaaaaagaaggtggacgtggtgatctgcctgagcacgaccgtgcgcaatgacactctgcaggaagccaaggagcacagggtgtccctgaagtgccgcaggcagctccgtgtggaggagctggagatgacggaggacatccgcttggagccagatctatacgaagcctgcaagagtgacatcaaaaacttctgttccgctgtgcaatatggcaacgctcagattatcgaatgtctgaaagaaaacaagaagcagctaagcacccgctgccaccaaaaagtatttaagctgcaggagacagagatgatggacccagagctagactacaccctcatgagggtctgcaagcagatgataaagaggttctgtccggaagcagattctaaaaccatgttgcagtgcttgaagcaaaataaaaacagtgaattgatggatcccaaatgcaaacagatgataaccaagcgccagatcacccagaacacagattaccgcttaaaccccatgttaagaaaagcctgtaaagctgacattcctaaattctgtcacggtatcctgactaaggccaaggatgattcagaattagaaggacaagtcatctcttgcctgaagctgagatatgctgaccagcgcctgtcttcagactgtgaagaccagatccgaatcattatccaggagtccgccctggactaccgcctggatcctcagctccagctgcactgctcagacgagatctccagtctatgtgctgaagaagcagcagcccaagagcagacaggtcaggtggaggagtgcctcaaggtcaacctgctcaagatcaaaacagaattgtgtaaaaaggaagtgctaaacatgctgaaggaaagcaaagcagacatctttgttgacccggtacttcatactgcttgtgccctggacattaaacaccactgcgcagccatcacccctggccgcgggcgtcaaatgtcctgtctcatggaagcactggaggataagcgggtgaggttacagcccgagtgcaaaaagcgcctcaatgaccggattgagatgtggagttacgcagcaaaggtggccccagcagatggcttctctgatcttgccatgcaagtaatgacgtctccatctaagaactacattctctctgtgatcagtgggagcatctgtatattgttcctgattggcctgatgtgtggacggatcaccaagcgagtgacacgagagctcaaggacaggtagagccaccttgaccaccaaaggaactacctatccagtgcccagtttgtacagccctcttgtatagcatccccactcacctcgctcttctcagaagtgacaccaaccccgtgttagagcattagcagatgtccactgcgttgtcccatccagcctccactcgtgtccatggtgtcctcctcctcctcaccgtgcagcagcagcagctggtcgctggggttactgcctttgtttggcaaacttgggtttacctgcctgtagacaagtctctctcataccaacagaacttccggtacttccagaaccaactcacctgacctgcaactcaaaggcttttttaagaaaaccaccaaaaaaaaaaatttttttaaagaaaaaaatgtatatagtaacgcatctcctccaggcttgatttgggcaatggggttatgtctttcatatgactgtgtaaaacaaagacaggacttggaggggaagcacaccacccagtgtgccatgactgaggtgtctcgttcatctctcagaagcaccttggggcctcgccagggccgtggtcttcaccgaggcgtgggtgggcagccgttccccaggctgtgtggggtcctgctttcttctgctgagacagtgacgctttccagtttccaccctaatcagccactgctggtcacagccccacagccatgggtatttctgtggtctcctcgcttcattgaagcaaagcatgagccttcctagacaagggcagctggggaggggaagggaccggaagtttgtgaagttgaacagtccatccatctgcactgagaggctggatcctgagtcccggggcagcaggatcccaggaaccttcctcctccagggcagcacaggactcagccatgtctggaccggccctgctgaggctacagtcactctggaagctctgcgcttcatcaggaggcaggactgtggcgggaggggtccttgaagatgggtgtggggagcagtgggtcaggaagtgggagccagaggtttgactcactttgctttatttttcaggctacaatacaggtcagagacaatggcttataaaggtttagtgtggtctcaggatgtgacaggcagtccagcctgacctttctgcacactccagacaaacttcccagacaagctcctttgtgcctctacgtggagagggtgtggaaagttatcacattaaaagatggaggatttgctctgttttttttctttctgtccatttgctgcgtgtacccactctagtaggcattggctaaatgttgtattttggcgattcatcaacctttgcagaatatgggctttatagaagcaatattcttggccatcccgcctcattcctccagtgtggagatgacaagtctgggtgtgagagggaggggtccgggcatcatggttcagcgtggcactcctttggttgagtttggggcatgagatcacagtggctgcacaagagagcagtgtgtacagtaggagagacatttatgtaatatatattttattaacctgttagatgtccacaaagtattataaatcacgtgcctaaaactgtccatgtagaccaaggcctgccctcggcgccccccactcttgcctctgctctgcacagtccacgtgcactgcaggaccggagcgacacatgtcttccctgaagggtgttcagtacaaggcgtgtcagtttgtggatcagttgatccaagttactccttgtctaacctgactgacatatatttgaatactgtggttttctttcttttttttctatttgctgcccttcctggaggcagtgggttccagaagccaactgattgtccccctgccaagtcaccaagggaagctgctaagctgcttagtcccctcggtcctgcttgtagggtcttcctgattgtcaacagctgtctgggatgcttcagtctcctaaaactggaaacgcagggtgcgagcagcacacactgcctcccgccactgccagccggagtgagcggcccgagagtctctgcaggttcccctgggggctgggggccgctgaggcctaatatcaagagccaggaatgtcatgtacatggaggtgcctacggacgtgcctggtgtggtttgcaggtaggatggatgttcactgtttgaccgggtggggtatccttcctctctgcagtctccttcccagtatgcgtaaacacccttatagttctaattgtgttgatatttctgttctttctgaattgagagaaaatcccattcgttgtctgcagatttggaagtttgatgaggaatttggttcttgaaacatctgtctttttttttttttttgagacagagtatctctctgttgcccaggctgcagtgcagtggcgcgatctcagctccctgcaacctccacctcctgggttcaagcaattctctgcctcagcctcctgagtagctgggattccaggcacccgccaccacgcctggcttatttttgtatttttagtagagatggggtttcaccatcttggccaggctggtcttgaactcctgatctcatgatccacccgcctcagcttcccaaagtgctgggattacaggtgtgagccaccctgcctggccaaaacatttgtcatctttataaatggtcagaatagaaaagttagctctgccagtatcttcaattacttattacaagaatgtctttcatcatcttacttggagcattttccaatgactggctcttgagagccccaggcagggccccgagcaagtttttctaagtgccaaggccagcaaagtctgaactggccgcactcattaagtccctcatttggcaaaacaaaacagggcctggggcacccctggttcctggccttataggtcagtcaactggctgagaaatggtcaagaaaagaaacaatgacccttctgtggatgtgagtggatgatggactctggcctgtgtctactctcctgatgtgtagcccaccaacagtaatagaagtagagggtagggggttttgccaaggctaaggcttcaggtacttgctaacagttatagcagctgggtcactgtcatctggacttaccagttcatgccagtgtccctgtgacttatgcatagtgtgcgccacagccctctagaggtacctggagcccggactgccaggctggaggctctggggtactgaaggtgagctgtctgggcaaactattaagaacaagacgaactgttcacaatggagcttctcccacagatggggagctctgtgaggccttcacctgggtgcatgttggacttccattgctgttgctgttgtccctagacaagcccgttagcaagaagcaccggcaggggagccatgcactccataggcttgggatcacccccgggaaagcgatcttccccgggctaccacccccagctgcagttctgtgttagtgcatccttcaaagctaggagaattctagggtgaccagtgagctaatgttgagtgagcaggtattgacttgaacacactgcaggcctttggctgtctcatgctgtccttactcttcttgggaacagtgagtcactcagctggccagggtggggatgcatcctggtgaagagacagctttccctgaagatgctacagaaagttactgtcagatttcatttgtttctgtttcctgagatcaactaacagaagaatctaatggtgagagtgtcttcattcatgttttacgttttatcaaggcacactggaaagggaattatgtggctgacttcccttggccttcccaagagaagattctgttcttatgtcagtgtggcttctggaagtgtctcctatcctcccatcctccaggcctgtggtgtgacttctgccccgaagttcctactatagtgagtcatctggggagaggccactgaaaagaggccttcccttcccatttcctcccctgcctccttagaacacactctaagtcagaacttaatctaagaagaaggaagctggaccaggaaccttggaagtcagccagccctagaacagtcagcctaaattttggccgtaatggcttttttggttttttgttttgtttctgagatggagtctcactccgttgccaggctggagtgctgtggcgctatctcagcttaccgaatcctccgactccctggttcaagcgattgtcctgcctcagcctccggagtagctgggattacaggcatgcaccaccacacccagctaatttttgtatttttagtagagacggggtttcaccgtgttgtccaggatggtctccatctcctgacctcatgatgtgcccacttcggccttccaaagtggccgcaaagtggcccacttcggccaaagtgcacttcggccttccaaagtgcattacaggcgtgagccaccacgcccggcctggccttttttttttttttcttttgagacacagtttcactcgttgcccaggctggagtgcagtggcgcaatctcggctcactgcaacttctgcctcctaggttcaagcagttctcctgcctcagcctcccaagtagttgggattacgggcatgcaccaccatgcctggataattttttcttatttttagtagagacaggatttcatcatgttggccacgctggtttcgaactcctgaccacatgtggtccacccaccttggcctcaattatgtgcattttggtatatttacttgtatttcaacatcttgtgagtttgaaaaacctgaaaggccagaatgcttccttttatttctcaccatttgggcagcacctaagtggttttgtaaaatgcagcatctggtgctgtgggtctctctcaggccttgagggacacttccttcctccccactcgcctcctctccactagactttggttcctagagggcgtggggccgggtctgaggttcttgcctgccttccctcccattggtctttggttgctcatccctctaactgcaccccttcttggtccttcctccacagacttcagataatagataagtcattagcaaaccagaccgaatctttagggtgaagagctccccaaagccatctggtgaggtcattgtggggaccagggactgattatttgtcacctggatcacaaagatgggactgtctgctcaggctggtggtgacaggatcctgacccgtggtcctctcccgctccctctgctccaccaggacacatgtataggacactgtgctgtgtgcagtggagaaatctccctgggccaggggaaagttcagacagtgcctctagattgtgttttgcctcctccaatgtagagttgacatctggaccccagagcccagcagggctttctgtcagacatgctagggtggtagaaatgggccctccaggtccccctgcagtgcactgggcagagacctccggaaagccggcagcgggagcgcttcctgggcagcttcccccagcacagtgttcccaaaccagtccatccggaaaacagtctgtacagcaaatgctgtgtgagatcttaggcttttcactttttttgttttgttttgtttttgaaagaaagaaaaaaatacaattaacaagcctcttttgtaaatgggtttcctttctatgtataaaatcgtggtggtcccttgtttttacatgttcatgctgtgtaattttgagatgttactgagatatgttctgaacataatgtgcatttttttctgtacagatgaaatgggagaatttaataaagagtttgcaggtttttacttgttaaaaaaaaaaaa

SEQ ID NO: 542 - DNA, 908 bp, Homo sapiens
ggcagggcctcgcccacaccaaacctgtggacgccgacccgggaccgccgctggctggctgctggctcactcgaccgtcatggagaccctgggggcccttctggtgctggagtttctgctcctctccccggtggaggcccagcaggccacggagcatcgcctgaagccgtggctggtgggcctggctgcggtagtcggcttcctgttcatcgtctatttggtcttgctggccaaccgcctctggtgttccaaggccagggctgaggacgaggaggagaccacgttcagaatggagtccaacctataccaggaccagagtgaagacaagagagagaagaaagaggccaaggagaaagaagagaagaggaagaaggagaaaaagacagcaaaggaaggagagagcaacttgggactggatctggaggaaaaagagcccggagaccatgagagagcaaagagcacagtcatgtgaagattcctggctgcctcttccaggcagtcccccagagatgcctcttctgccccctaaaagcagtgccctggacttgaagcccgtgaaatgactccatctgggattcagaatacagtgttctcaagtgaagaaggcttggaacccaccccacctccctcattgggggctctctgggcaaacatggttttcatgcacccctcttcctgagcttggtccctgcctggtgattcttcttatactcggagagcatccctggttgaggagacacccgcaatcctccacgatctcatggctccacctgcttctccccactgcctgatttcttttctctctgcctgatgtctactgaacagaacttcccctctcccatgcacccactgccagctgagagctgcttcccaatggcctgcattaaagcattcgtaacagccctttg

SEQ ID NO: 543 - DNA, 2327 bp, Homo sapiens
ccgtgtccgcatgcgcgactgagccgggtggatggtactgctgcatccgggtgtctggaggctgtggccgttttgttttcttggctaaaatcgggggagtgaggcgggccggcgcggcgcgacaccgggctccggaaccactgcacgacggggctggactgacctgaaaaaaatgtctggatttctagagggcttgagatgctcagaatgcattgactggggggaaaagcgcaatactattgcttccattgctgctggtgtactattttttacaggctggtggattatcatagatgcagctgttatttatcccaccatgaaagatttcaaccactcataccatgcctgtggtgttatagcaaccatagccttcctaatgattaatgcagtatcgaatggacaagtccgaggtgatagttacagtgaaggttgtctgggtcaaacaggtgctcgcatttggcttttcgttggtttcatgttggcctttggatctctgattgcatctatgtggattctttttggaggttatgttgctaaagaaaaagacatagtataccctggaattgctgtatttttccagaatgccttcatcttttttggagggctggtttttaagtttggccgcactgaagacttatggcagtgaacacatctgatttcccacagcacaacagccctgcatgggtttgtttgtttttttactgctcactcccaaccttttgtaatgccattttctaaacttatttctgagtgtagtctcagcttaaagttgtgtaatactaaaatcacgagaacacctaaacaacaaccaaaaatctattgtggtatgcacttgattaacttataaaatgttagaggaaactttcacatgaataatttttgtcaaattttatcatggtataatttgtaaaaataaaaagaaattacaaaagaaattatggatttgtcaatgtaagtatttgtcatatctgaggtccaaaaccacaatgaaagtgctctgaagatttaatgtgtttattcaaatgtggtctcttctgtgtcaaatgttaaatgaaatataaacattttttagtttttaaaatattccgtggtcaaaattcttcctcactataattggtatttacttttaccaaaaattctgtgaacatgtaatgtaactggcttttgagggtctcccaaggggtgagtggacgtgttggaagagagaagcaccatggtccagccaccaggctccctgtgtcccttccatgggaaggtcttccgctgtgcctctcattccaagggcaggaagatgtgactcagccatgacacgtggttctggtgggatgcacagtcactccacatccaccattgaaggaaaggaaaaaagggcagagacttgacactccagtcttagacaggggacaatttctttgtagttgttctgataataaactgggttccatgttgcatttcatctgtgtactgaaccactagcctaatagaccagcacggtcaactagaatgacaaacattagctactgggaactcttgttgtctcttcctcttcagaactcttgtccccccaggctccccacctctgcaagatgggatacactcttcaggaccacagtttgaaatgtctttcataaaatgtgctacaattagccttcggaatatttgctgggtgatttaaatgtgtgggtctcatttccatgctagccatggtcatctgacagtctctacactgtgaatattgcctggtgatcaagactctcctcaaagaaatgacttgctgtcatcccacatgaactcctgatgttttttctacaaaagtccataaaatgtgaaaactggagaagatcttagaggttgaagcccaccttctcttttcacataggagggaacagaccatggaaatttaaacgacttcctcacggtcacagaactagttttttaatcctcaggcagtgcatccccccaccctacaactgagcacaacctctttccccacagtgcaattcagaatatgctcagggaatgccagccaccttgtaaaactgctgggagaaaagcatgattcccacaaggactaagtatcagtgatttgtaattttcctgttttgtattatctgctttgctgatgtagacaagagttaactgagtagcatgctttattaagcatgagaaagaatcttaagaattgtcaataaaattaacccaaaactttaataatgtgtctgtaaccaagaaaatattgatagcatcatcctaatgaaactaaacatttattttaaacttattaaattgactcttaaactaaaaaaaaaaaaaaaaaaaaaaaaaaa

SEQ ID NO: 544 - DNA, 2173 bp, Homo sapiens
actgctgcatccgggtgtctggaggctgtggccgttttgttttcttggctaaaatcgggggagtgaggcgggccggcgcggcgcgacaccgggctccggaaccactgcacgacggggctggactgacctgaaaaaaatgtctggatttctagagggcttgagatgctcagaatgcattgactggggggaaaagcgcaatactattgcttccattgctgctggtgtactattttttacaggctggtggattatcatagatgcagctgttatttatcccaccatgaaagatttcaaccactcataccatgcctgtggtgttatagcaaccatagccttcctaatgattaatgcagtatcgaatggacaagtccgaggtgatagttacagtgaaggttgtctgggtcaaacagaaaaagacatagtataccctggaattgctgtatttttccagaatgccttcatcttttttggagggctggtttttaagtttggccgcactgaagacttatggcagtgaacacatctgatttcccacagcacaacagccctgcatgggtttgtttgtttttttactgctcactcccaaccttttgtaatgccattttctaaacttatttctgagtgtagtctcagcttaaagttgtgtaatactaaaatcacgagaacacctaaacaacaaccaaaaatctattgtggtatgcacttgattaacttataaaatgttagaggaaactttcacatgaataatttttgtcaaattttatcatggtataatttgtaaaaataaaaagaaattacaaaagaaattatggatttgtcaatgtaagtatttgtcatatctgaggtccaaaaccacaatgaaagtgctctgaagatttaatgtgtttattcaaatgtggtctcttctgtgtcaaatgttaaatgaaatataaacattttttagtttttaaaatattccgtggtcaaaattcttcctcactataattggtatttacttttaccaaaaattctgtgaacatgtaatgtaactggcttttgagggtctcccaaggggtgagtggacgtgttggaagagagaagcaccatggtccagccaccaggctccctgtgtcccttccatgggaaggtcttccgctgtgcctctcattccaagggcaggaagatgtgactcagccatgacacgtggttctggtgggatgcacagtcactccacatccaccattgaaggaaaggaaaaaagggcagagacttgacactccagtcttagacaggggacaatttctttgtagttgttctgataataaactgggttccatgttgcatttcatctgtgtactgaaccactagcctaatagaccagcacggtcaactagaatgacaaacattagctactgggaactcttgttgtctcttcctcttcagaactcttgtccccccaggctccccacctctgcaagatgggatacactcttcaggaccacagtttgaaatgtctttcataaaatgtgctacaattagccttcggaatatttgctgggtgatttaaatgtgtgggtctcatttccatgctagccatggtcatctgacagtctctacactgtgaatattgcctggtgatcaagactctcctcaaagaaatgacttgctgtcatcccacatgaactcctgatgttttttctacaaaagtccataaaatgtgaaaactggagaagatcttagaggttgaagcccaccttctcttttcacataggagggaacagaccatggaaatttaaacgacttcctcacggtcacagaactagttttttaatcctcaggcagtgcatccccccaccctacaactgagcacaacctctttccccacagtgcaattcagaatatgctcagggaatgccagccaccttgtaaaactgctgggagaaaagcatgattcccacaaggactaagtatcagtgatttgtaattttcctgttttgtattatctgctttgctgatgtagacaagagttaactgagtagcatgctttattaagcatgagaaagaatcttaagaattgtcaataaaattaacccaaaactttaataatgtgtctgtaaccaagaaaatattgatagcatcatcctaatgaaactaaacatttattttaaacttattaaattgactcttaaactaa

SEQ ID NO: 545 - DNA, 2496 bp, Homo sapiens
cgggcggggagtgggggtaagagagtagcggccgcaggctggagaggcctcggagccggggccgtctgacgggctggtgcccacagcacaggctcgttgccgccaccctcccggaagccgcagacccgggctgagccgccgcggacctctcctctcctgggtccggcggcgccaggagaaggcgacggcgtccagaccccgccaagacggagaggggaccgcgccctcccccgggacaccccaggatccctggaaaatcccccgatcccccacttcacagctggacaagccgaagccccgagaaaggagcgtgacccggccagctccctcagcgaggggtgccccggctaaagtgacctgaaaaaaatgtctggatttctagagggcttgagatgctcagaatgcattgactggggggaaaagcgcaatactattgcttccattgctgctggtgtactattttttacaggctggtggattatcatagatgcagctgttatttatcccaccatgaaagatttcaaccactcataccatgcctgtggtgttatagcaaccatagccttcctaatgattaatgcagtatcgaatggacaagtccgaggtgatagttacagtgaaggttgtctgggtcaaacaggtgctcgcatttggcttttcgttggtttcatgttggcctttggatctctgattgcatctatgtggattctttttggaggttatgttgctaaagaaaaagacatagtataccctggaattgctgtatttttccagaatgccttcatcttttttggagggctggtttttaagtttggccgcactgaagacttatggcagtgaacacatctgatttcccacagcacaacagccctgcatgggtttgtttgtttttttactgctcactcccaaccttttgtaatgccattttctaaacttatttctgagtgtagtctcagcttaaagttgtgtaatactaaaatcacgagaacacctaaacaacaaccaaaaatctattgtggtatgcacttgattaacttataaaatgttagaggaaactttcacatgaataatttttgtcaaattttatcatggtataatttgtaaaaataaaaagaaattacaaaagaaattatggatttgtcaatgtaagtatttgtcatatctgaggtccaaaaccacaatgaaagtgctctgaagatttaatgtgtttattcaaatgtggtctcttctgtgtcaaatgttaaatgaaatataaacattttttagtttttaaaatattccgtggtcaaaattcttcctcactataattggtatttacttttaccaaaaattctgtgaacatgtaatgtaactggcttttgagggtctcccaaggggtgagtggacgtgttggaagagagaagcaccatggtccagccaccaggctccctgtgtcccttccatgggaaggtcttccgctgtgcctctcattccaagggcaggaagatgtgactcagccatgacacgtggttctggtgggatgcacagtcactccacatccaccattgaaggaaaggaaaaaagggcagagacttgacactccagtcttagacaggggacaatttctttgtagttgttctgataataaactgggttccatgttgcatttcatctgtgtactgaaccactagcctaatagaccagcacggtcaactagaatgacaaacattagctactgggaactcttgttgtctcttcctcttcagaactcttgtccccccaggctccccacctctgcaagatgggatacactcttcaggaccacagtttgaaatgtctttcataaaatgtgctacaattagccttcggaatatttgctgggtgatttaaatgtgtgggtctcatttccatgctagccatggtcatctgacagtctctacactgtgaatattgcctggtgatcaagactctcctcaaagaaatgacttgctgtcatcccacatgaactcctgatgttttttctacaaaagtccataaaatgtgaaaactggagaagatcttagaggttgaagcccaccttctcttttcacataggagggaacagaccatggaaatttaaacgacttcctcacggtcacagaactagttttttaatcctcaggcagtgcatccccccaccctacaactgagcacaacctctttccccacagtgcaattcagaatatgctcagggaatgccagccaccttgtaaaactgctgggagaaaagcatgattcccacaaggactaagtatcagtgatttgtaattttcctgttttgtattatctgctttgctgatgtagacaagagttaactgagtagcatgctttattaagcatgagaaagaatcttaagaattgtcaataaaattaacccaaaactttaataatgtgtctgtaaccaagaaaatattgatagcatcatcctaatgaaactaaacatttattttaaacttattaaattgactcttaaactaa

SEQ ID NO: 546 - DNA, 3973 bp, Homo sapiens
gggctgggggagggtatataagccgagtaggcgacggtgaggtcgacgccggccaagacagcacagacagattgacctattggggtgtttcgcgagtgtgagagggaagcgccgcggcctgtatttctagacctgcccttcgcctggttcgtggcgccttgtgaccccgggcccctgccgcctgcaagtcggaaattgcgctgtgctcctgtgctacggcctgtggctggactgcctgctgctgcccaactggctggcaagatgaagctctccctggtggccgcgatgctgctgctgctcagcgcggcgcgggccgaggaggaggacaagaaggaggacgtgggcacggtggtcggcatcgacctggggaccacctactcctgcgtcggcgtgttcaagaacggccgcgtggagatcatcgccaacgatcagggcaaccgcatcacgccgtcctatgtcgccttcactcctgaaggggaacgtctgattggcgatgccgccaagaaccagctcacctccaaccccgagaacacggtctttgacgccaagcggctcatcggccgcacgtggaatgacccgtctgtgcagcaggacatcaagttcttgccgttcaaggtggttgaaaagaaaactaaaccatacattcaagttgatattggaggtgggcaaacaaagacatttgctcctgaagaaatttctgccatggttctcactaaaatgaaagaaaccgctgaggcttatttgggaaagaaggttacccatgcagttgttactgtaccagcctattttaatgatgcccaacgccaagcaaccaaagacgctggaactattgctggcctaaatgttatgaggatcatcaacgagcctacggcagctgctattgcttatggcctggataagagggagggggagaagaacatcctggtgtttgacctgggtggcggaaccttcgatgtgtctcttctcaccattgacaatggtgtcttcgaagttgtggccactaatggagatactcatctgggtggagaagactttgaccagcgtgtcatggaacacttcatcaaactgtacaaaaagaagacgggcaaagatgtcaggaaagacaatagagctgtgcagaaactccggcgcgaggtagaaaaggccaaacgggccctgtcttctcagcatcaagcaagaattgaaattgagtccttctatgaaggagaagacttttctgagaccctgactcgggccaaatttgaagagctcaacatggatctgttccggtctactatgaagcccgtccagaaagtgttggaagattctgatttgaagaagtctgatattgatgaaattgttcttgttggtggctcgactcgaattccaaagattcagcaactggttaaagagttcttcaatggcaaggaaccatcccgtggcataaacccagatgaagctgtagcgtatggtgctgctgtccaggctggtgtgctctctggtgatcaagatacaggtgacctggtactgcttgatgtatgtccccttacacttggtattgaaactgtgggaggtgtcatgaccaaactgattccaaggaacacagtggtgcctaccaagaagtctcagatcttttctacagcttctgataatcaaccaactgttacaatcaaggtctatgaaggtgaaagacccctgacaaaagacaatcatcttctgggtacatttgatctgactggaattcctcctgctcctcgtggggtcccacagattgaagtcacctttgagatagatgtgaatggtattcttcgagtgacagctgaagacaagggtacagggaacaaaaataagatcacaatcaccaatgaccagaatcgcctgacacctgaagaaatcgaaaggatggttaatgatgctgagaagtttgctgaggaagacaaaaagctcaaggagcgcattgatactagaaatgagttggaaagctatgcctattctctaaagaatcagattggagataaagaaaagctgggaggtaaactttcctctgaagataaggagaccatggaaaaagctgtagaagaaaagattgaatggctggaaagccaccaagatgctgacattgaagacttcaaagctaagaagaaggaactggaagaaattgttcaaccaattatcagcaaactctatggaagtgcaggccctcccccaactggtgaagaggatacagcagaaaaagatgagttgtagacactgatctgctagtgctgtaatattgtaaatactggactcaggaacttttgttaggaaaaaattgaaagaacttaagtctcgaatgtaattggaatcttcacctcagagtggagttgaaactgctatagcctaagcggctgtttactgcttttcattagcagttgctcacatgtctttgggtgggggggagaagaagaattggccatcttaaaaagcgggtaaaaaacctgggttagggtgtgtgttcaccttcaaaatgttctatttaacaactgggtcatgtgcatctggtgtaggaagttttttctaccataagtgacaccaataaatgtttgttatttacactggtctaatgtttgtgagaagcttctaattagatcaattacttattttaggaaatttaagactagatactcgtgtgtggggtgaggggagggagtatttggtatgttgggataaggaaacacttctatttaatgcttccagggatttttttttttttttttaaccctcctgggcccaagtgatccttccacctcagtctcccagctaattgagaccacaggcttgttaccaccatgctcggcttttgcattaatctaagaaaaggggagagaagttaatccacatctttactcaggcaaggggcatttcacagtgcccaagagtggggttttcttgaacatacttggtttcctatttccccttatctttctaaaactgcctttctggtggctttttttaaaattattactaatgatgcttttatagctgcttggattctctgagaaatgatggggagtgagtgatcactggtattaactttatacacttggatttcatttgtaactttaggatgtaaaggtatattgtgaaccctagctgtgtcagaatctccatccctgaaatttctcattagtggtactggggtgggatcttggatggtgacattgaaactacactaaatcccctcactatgaatgggttgttaaaggcaatggtttgtgtcaaaactggtttaggattacttagattgtgttcctgaagaaaagagtccaggtaaatggtatgatcaataaaggacaggctggtgctaacataaaatccaatattgtaatcctagcactttgggaggccaaggcgggtggatcacaaggtcaagagatagagaccatctttgccaacatggtgaaactccatctctactgaaaatacaaaaattagctgggcgtggtagtgcaagctgaaggctgaggcaggagaatcactcgaacccgggaggcagaggttgcagtgagccgagatcacaccactgtactccagcccggcactccagcctggcgacaagagtgagactccacctcaaaaaaaaaaaaaagaatccaatactgcccaaggataggtattttatagatgggcaactggctgaaaggttaattctctagggctagtagaactggatcccaacaccaaactcttaattagacctaggcctcagctgcactgcccgaaaagcatttgggcagaccctgagcagaatactggtctcaggccaagcccaatacagccattaaagatgacctacagtgctgtgtaccctggggcaatagggttaaatggtagttagcaactagggctagtcttcccttacctcaaaggctctcactaccgtggaccacctagtctgtaactctttctgaggagctgttactgaatattaaaaagatagacttcaactatgaaa

SEQ ID NO: 547 - DNA, 4149 bp, Homo sapiens
atgctgacaatcttcttccttcccctggccacctctctgcccacttgcttcctcagtaccttggtccagctcttcctgcaacggcccaggagctcagagctccacatctgaccttctagtcatgaccaggaccagggcagcactcctcctgttcacagccttagcaacttctctaggtttcaacttggacacagaggagctgacagccttccgtgtggacagcgctgggtttggagacagcgtggtccagtatgccaactcctgggtggtggttggagccccccaaaagataacagctgccaaccaaacgggtggcctctaccagtgtggctacagcactggtgcctgtgagcccatcggcctgcaggtgcccccggaggccgtgaacatgtccctgggcctgtccctggcgtctaccaccagcccttcccagctgctggcctgcggccccaccgtgcaccacgagtgcgggaggaacatgtacctcaccggactctgcttcctcctgggccccacccagctcacccagaggctcccggtgtccaggcaggagtgcccaagacaggagcaggacattgtgttcctgatcgatggctcaggcagcatctcctcccgcaactttgccacgatgatgaacttcgtgagagctgtgataagccagttccagagacccagcacccagttttccctgatgcagttctccaacaaattccaaacacacttcactttcgaggaattcaggcgcagctcaaaccccctcagcctgttggcttctgttcaccagctgcaagggtttacatacacggccaccgccatccaaaatgtcgtgcaccgattgttccatgcctcatatggggcccgtagggatgccgccaaaattctcattgtcatcactgatgggaagaaagaaggcgacagcctggattataaggatgtcatccccatggctgatgcagcaggcatcatccgctatgcaattggggttggattagcttttcaaaacagaaattcttggaaagaattaaatgacattgcatcgaagccctcccaggaacacatatttaaagtggaggactttgatgctctgaaagatattcaaaaccaactgaaggagaagatctttgccattgagggtacggagaccacaagcagtagctccttcgaattggagatggcacaggagggcttcagcgctgtgttcacacctgatggccccgttctgggggctgtggggagcttcacctggtctggaggtgccttcctgtaccccccaaatatgagccctaccttcatcaacatgtctcaggagaatgtggacatgagggactcttacctgggttactccaccgagctggccctctggaaaggggtgcagagcctggtcctgggggccccccgctaccagcacaccgggaaggctgtcatcttcacccaggtgtccaggcaatggaggatgaaggccgaagtcacggggactcagatcggctcctacttcggggcctccctctgctccgtggacgtagacagcgacggcagcaccgacctggtcctcatcggggccccccattactacgagcagacccgagggggccaggtgtctgtgtgtcccttgcccagggggtggagaaggtggtggtgtgatgctgttctctacggggagcagggccacccctggggtcgctttggggcggctctgacagtgctgggggatgtgaatggggacaagctgacagacgtggtcatcggggccccaggagaggaggagaaccggggtgctgtctacctgtttcacggagtcttgggacccagcatcagcccctcccacagccagcggatcgcgggctcccagctctcctccaggctgcagtattttgggcaggcactgagcgggggtcaagacctcacccaggatggactggtggacctggctgtgggggcccggggccaggtgctcctgctcaggaccagacctgtgctctgggtgggggtgagcatgcagttcatacctgccgagatccccaggtctgcgtttgagtgtcgggagcaggtggtctctgagcagaccctggtacagtccaacatctgcctttacattgacaaacgttctaagaacctgcttgggagccgtgacctccaaagctctgtgaccttggacctggccctcgaccctggccgcctgagtccccgtgccaccttccaggaaacaaagaaccggagtctgagccgagtccgagtcctcgggctgaaggcacactgtgaaaacttcaacctgctgctcccgagctgcgtggaggactctgtgacccccattaccttgcgtctgaacttcacgctggtgggcaagcccctccttgccttcagaaacctgcggcctatgctggccgccgatgctcagagatacttcacggcctccctaccctttgagaagaactgtggagccgaccatatctgccaggacaatctcggcatctccttcagcttcccaggcttgaagtccctgctggtggggagtaacctggagctgaacgcagaagtgatggtgtggaatgacggggaagactcctacggaaccaccatcaccttctcccaccccgcaggactgtcctaccgctacgtggcagagggccagaaacaagggcagctgcgttccctgcacctgacatgtgacagcgccccagttgggagccagggcacctggagcaccagctgcagaatcaaccacctcatcttccgtggcggcgcccagatcaccttcttggctacctttgacgtctcccccaaggctgtcctgggagaccggctgcttctgacagccaatgtgagcagtgagaacaacactcccaggaccagcaagaccaccttccagctggagctcccggtgaagtatgctgtctacactgtggttagcagccacgaacaattcaccaaatacctcaacttctcagagtctgaggagaaggaaagccatgtggccatgcacagataccaggtcaataacctgggacagagggacctgcctgtcagcatcaacttctgggtgcctgtggagctgaaccaggaggctgtgtggatggatgtggaggtctcccacccccagaacccatcccttcggtgctcctcagagaaaatcgcacccccagcatctgacttcctggcgcacattcagaagaatcccgtgctggactgctccattgctggctgcctgcggttccgctgtgacgtcccctccttcagcgtccaggaggagctggatttcaccctgaagggcaacctcagctttggctgggtccgccagatattgcagaagaaggtgtcggtcgtgagtgtggctgaaattacgttcgacacatccgtgtactcccagcttccaggacaggaggcatttatgagagctcagacgacaacggtgctggagaagtacaaggtccacaaccccacccccctcatcgtaggcagctccattgggggtctgttgctgctggcactcatcacagcggtactgtacaaagttggcttcttcaagcgtcagtacaaggaaatgatggaggaggcaaatggacaaattgccccagaaaacgggacacagacccccagcccgcccactccccattaccctcaggacaatgtctgaactctccagcttcgcgtgagaagtccccttccatcccagagggtgggcttcagggcgcacagcatgagaggctctgtgcccccatcaccctcgtttccagtgaattagtgtcatgtcagcatcagctcagggcttcatcgtggggctctcagttccgatttcccaggctgaattgggagtgagatgcctgcatgctgggttctgcacagctggcctcccgcgttgggcaacattgctggctggaagggaggagcgccctctagggagggacatggccccggtgcggctgcagctcacccagccccaggggcagaagagacccaaccacttctattttttgaggctatgaatatagtacctgaaaaaatgccaagacatgattatttttttaaaaagcgtactttaaatgtttgtgttaataaattaaaacatgcacaaaaagatgcatctaccgctcttgggaaatatgtcaaaggtctaaaaataaaaaagccttctgtgaaaaaaaaaaaaaaaaa

SEQ ID NO: 548 - DNA, 4720 bp, Homo sapiens
atgctgacaatcttcttccttcccctggccacctctctgcccacttgcttcctcagtaccttggtccagctcttcctgcaacggcccaggagctcagagctccacatctgaccttctagtcatgaccaggaccagggcagcactcctcctgttcacagccttagcaacttctctaggtttcaacttggacacagaggagctgacagccttccgtgtggacagcgctgggtttggagacagcgtggtccagtatgccaactcctgggtggtggttggagccccccaaaagataacagctgccaaccaaacgggtggcctctaccagtgtggctacagcactggtgcctgtgagcccatcggcctgcaggtgcccccggaggccgtgaacatgtccctgggcctgtccctggcgtctaccaccagcccttcccagctgctggcctgcggccccaccgtgcaccacgagtgcgggaggaacatgtacctcaccggactctgcttcctcctgggccccacccagctcacccagaggctcccggtgtccaggcaggagtgcccaagacaggagcaggacattgtgttcctgatcgatggctcaggcagcatctcctcccgcaactttgccacgatgatgaacttcgtgagagctgtgataagccagttccagagacccagcacccagttttccctgatgcagttctccaacaaattccaaacacacttcactttcgaggaattcaggcgcagctcaaaccccctcagcctgttggcttctgttcaccagctgcaagggtttacatacacggccaccgccatccaaaatgtcgtgcaccgattgttccatgcctcatatggggcccgtagggatgccgccaaaattctcattgtcatcactgatgggaagaaagaaggcgacagcctggattataaggatgtcatccccatggctgatgcagcaggcatcatccgctatgcaattggggttggattagcttttcaaaacagaaattcttggaaagaattaaatgacattgcatcgaagccctcccaggaacacatatttaaagtggaggactttgatgctctgaaagatattcaaaaccaactgaaggagaagatctttgccattgagggtacggagaccacaagcagtagctccttcgaattggagatggcacaggagggcttcagcgctgtgttcacacctgatggccccgttctgggggctgtggggagcttcacctggtctggaggtgccttcctgtaccccccaaatatgagccctaccttcatcaacatgtctcaggagaatgtggacatgagggactcttacctgggttactccaccgagctggccctctggaaaggggtgcagagcctggtcctgggggccccccgctaccagcacaccgggaaggctgtcatcttcacccaggtgtccaggcaatggaggatgaaggccgaagtcacggggactcagatcggctcctacttcggggcctccctctgctccgtggacgtagacagcgacggcagcaccgacctggtcctcatcggggccccccattactacgagcagacccgagggggccaggtgtctgtgtgtcccttgcccagggggtggagaaggtggtggtgtgatgctgttctctacggggagcagggccacccctggggtcgctttggggcggctctgacagtgctgggggatgtgaatggggacaagctgacagacgtggtcatcggggccccaggagaggaggagaaccggggtgctgtctacctgtttcacggagtcttgggacccagcatcagcccctcccacagccagcggatcgcgggctcccagctctcctccaggctgcagtattttgggcaggcactgagcgggggtcaagacctcacccaggatggactggtggacctggctgtgggggcccggggccaggtgctcctgctcaggaccagacctgtgctctgggtgggggtgagcatgcagttcatacctgccgagatccccaggtctgcgtttgagtgtcgggagcaggtggtctctgagcagaccctggtacagtccaacatctgcctttacattgacaaacgttctaagaacctgcttgggagccgtgacctccaaagctctgtgaccttggacctggccctcgaccctggccgcctgagtccccgtgccaccttccaggaaacaaagaaccggagtctgagccgagtccgagtcctcgggctgaaggcacactgtgaaaacttcaacctgctgctcccgagctgcgtggaggactctgtgacccccattaccttgcgtctgaacttcacgctggtgggcaagcccctccttgccttcagaaacctgcggcctatgctggccgccgatgctcagagatacttcacggcctccctaccctttgagaagaactgtggagccgaccatatctgccaggacaatctcggcatctccttcagcttcccaggcttgaagtccctgctggtggggagtaacctggagctgaacgcagaagtgatggtgtggaatgacggggaagactcctacggaaccaccatcaccttctcccaccccgcaggactgtcctaccgctacgtggcagagggccagaaacaagggcagctgcgttccctgcacctgacatgtgacagcgccccagttgggagccagggcacctggagcaccagctgcagaatcaaccacctcatcttccgtggcggcgcccagatcaccttcttggctacctttgacgtctcccccaaggctgtcctgggagaccggctgcttctgacagccaatgtgagcagtgagaacaacactcccaggaccagcaagaccaccttccagctggagctcccggtgaagtatgctgtctacactgtggttagcagccacgaacaattcaccaaatacctcaacttctcagagtctgaggagaaggaaagccatgtggccatgcacagataccaggtcaataacctgggacagagggacctgcctgtcagcatcaacttctgggtgcctgtggagctgaaccaggaggctgtgtggatggatgtggaggtctcccacccccagaacccatcccttcggtgctcctcagagaaaatcgcacccccagcatctgacttcctggcgcacattcagaagaatcccgtgctggactgctccattgctggctgcctgcggttccgctgtgacgtcccctccttcagcgtccaggaggagctggatttcaccctgaagggcaacctcagctttggctgggtccgccagatattgcagaagaaggtgtcggtcgtgagtgtggctgaaattacgttcgacacatccgtgtactcccagcttccaggacaggaggcatttatgagagctcagacgacaacggtgctggagaagtacaaggtccacaaccccacccccctcatcgtaggcagctccattgggggtctgttgctgctggcactcatcacagcggtactgtacaaagttggcttcttcaagcgtcagtacaaggaaatgatggaggaggcaaatggacaaattgccccagaaaacgggacacagacccccagcccgcccagtgagaaatgatcccctctttgccttggacttcttctcccccgcgagttttccccacttacttaccctcacctgtcaggcctgacggggaggaaccactgcaccaccgagagaggctgggatgggcctgcttcctgtctttgggagaaaacgtcttgcttgggaaggggcctttgtcttgtcaaggttccaactggaaacccttaggacagggtccctgctgtgttccccaaaggacttgacttgcaatttctacctagaaatacatggacaatacccccaggcctcagtctcccttctcccatgaggcacgaatgatctttctttcctttctttttttttttttttcttttcttttttttttttttgagacggagtctcgctctgtcacccaggctggagtgcaatggcgtgatctcggctcactgcaacctccgcctcccgggttcaagtaattctgctgtctcagcctcctgagtagctgggactacaggcacacgccacctcgcccggcccgatctttctaaaatacagttctgaatatgctgctcatccccacctgtcttcaacagctccccattaccctcaggacaatgtctgaactctccagcttcgcgtgagaagtccccttccatcccagagggtgggcttcagggcgcacagcatgagaggctctgtgcccccatcaccctcgtttccagtgaattagtgtcatgtcagcatcagctcagggcttcatcgtggggctctcagttccgatttcccaggctgaattgggagtgagatgcctgcatgctgggttctgcacagctggcctcccgcgttgggcaacattgctggctggaagggaggagcgccctctagggagggacatggccccggtgcggctgcagctcacccagccccaggggcagaagagacccaaccacttctattttttgaggctatgaatatagtacctgaaaaaatgccaagacatgattatttttttaaaaagcgtactttaaatgtttgtgttaataaattaaaacatgcacaaaaagatgcatctaccgctcttgggaaatatgtcaaaggtctaaaaataaaaaagccttctgtgaaaaaaaaaaaaaaaaa

SEQ ID NO: 549 - DNA, 2569 bp, Homo sapiens
tctctgcccacttgcttcctcagtaccttggtccagctcttcctgcaacggcccaggagctcagagctccacatctgaccttctagtcatgaccaggaccagggcagcactcctcctgttcacagccttagcaacttctctaggtttcaacttggacacagaggagctgacagccttccgtgtggacagcgctgggtttggagacagcgtggtccagtatgccaactcctgggtggtggttggagccccccaaaagataacagctgccaaccaaacgggtggcctctaccagtgtggctacagcactggtgcctgtgagcccatcggcctgcaggtgcccccggaggccgtgaacatgtccctgggcctgtccctggcgtctaccaccagcccttcccagctgctggcctgcggccccaccgtgcaccacgagtgcgggaggaacatgtacctcaccggactctgcttcctcctgggccccacccagctcacccagaggctcccggtgtccaggcaggagtgcccaagacaggagcaggacattgtgttcctgatcgatggctcaggcagcatctcctcccgcaactttgccacgatgatgaacttcgtgagagctgtgataagccagttccagagacccagcacccagttttccctgatgcagttctccaacaaattccaaacacacttcactttcgaggaattcaggcgcagctcaaaccccctcagcctgttggcttctgttcaccagctgcaagggtttacatacacggccaccgccatccaaaatgtcgtgcaccgattgttccatgcctcatatggggcccgtagggatgccgccaaaattctcattgtcatcactgatgggaagaaagaaggcgacagcctggattataaggatgtcatccccatggctgatgcagcaggcatcatccgctatgcaattggggttggattagcttttcaaaacagaaattcttggaaagaattaaatgacattgcatcgaagccctcccaggaacacatatttaaagtggaggactttgatgctctgaaagatattcaaaaccaactgaaggagaagatctttgccattgagggtacggagaccacaagcagtagctccttcgaattggagatggcacaggagggcttcagcgctgtgttcacacctgatggccccgttctgggggctgtggggagcttcacctggtctggaggtgccttcctgtaccccccaaatatgagccctaccttcatcaacatgtctcaggagaatgtggacatgagggactcttacctgggttactccaccgagctggccctctggaaaggggtgcagagcctggtcctgggggccccccgctaccagcacaccgggaaggctgtcatcttcacccaggtgtccaggcaatggaggatgaaggccgaagtcacggggactcagatcggctcctacttcggggcctccctctgctccgtggacgtagacagcgacggcagcaccgacctggtcctcatcggggccccccattactacgagcagacccgagggggccaggtgtctgtgtgtcccttgcccagggggtggagaaggtggtggtgtgatgctgttctctacggggagcagggccacccctggggtcgctttggggcggctctgacagtgctgggggatgtgaatggggacaagctgacagacgtggtcatcggggccccaggagaggaggagaaccggggtgctgtctacctgtttcacggagtcttgggacccagcatcagcccctcccacagccagcggatcgcgggctcccagctctcctccaggctgcagtattttgggcaggcactgagcgggggtcaagacctcacccaggatggactggtggacctggctgtgggggcccggggccaggtgctcctgctcaggaccagacctgtgctctgggtgggggtgagcatgcagttcatacctgccgagatccccaggtctgcgtttgagtgtcgggagcaggtggtctctgagcagaccctggtacagtccaacatctgcctttacattgacaaacgttctaagaacctgcttgggagccgtgacctccaaagctctgtgaccttggacctggccctcgaccctggccgcctgagtccccgtgccaccttccaggaaacaaagaaccggagtctgagccgagtccgagtcctcgggctgaaggcacactgtgaaaacttcaacctgctgctcccgagctgcgtggaggactctgtgacccccattaccttgcgtctgaacttcacgctggtgggcaagcccctccttgccttcagaaacctgcggcctatgctggccgccgatgctcagagatacttcacggcctccctaccctttgagaagaactgtggagccgaccatatctgccaggacaatctcggcatctccttcagcttcccaggaaacaagggcagctgcgttccctgcacctgacatgtgacagcgccccagttgggagccagggcacctggagcaccagctgcagaatcaaccacctcatcttccgtggcggcgccc

SEQ ID NO: 550 - DNA, 2015 bp, Homo sapiens
tctctgcccacttgcttcctcagtaccttggtccagctcttcctgcaacggcccaggagctcagagctccacatctgaccttctagtcatgaccaggaccagggcagcactcctcctgttcacagccttagcaacttctctaggtttcaacttggacacagaggagctgacagccttccgtgtggacagcgctgggtttggagacagcgtggtccagtatgccaactcctgggtggtggttggagccccccaaaagataacagctgccaaccaaacgggtggcctctaccagtgtggctacagcactggtgcctgtgagcccatcggcctgcaggtgcccccggaggccgtgaacatgtccctgggcctgtccctggcgtctaccaccagcccttcccagctgctggcctgcggccccaccgtgcaccacgagtgcgggaggaacatgtacctcaccggactctgcttcctcctgggccccacccagctcacccagaggctcccggtgtccaggcaggagtgcccaagacaggagcaggacattgtgttcctgatcgatggctcaggcagcatctcctcccgcaactttgccacgatgatgaacttcgtgagagctgtgataagccagttccagagacccagcacccagttttccctgatgcagttctccaacaaattccaaacacacttcactttcgaggaattcaggcgcagctcaaaccccctcagcctgttggcttctgttcaccagctgcaagggtttacatacacggccaccgccatccaaaatgtcgtgcaccgattgttccatgcctcatatggggcccgtagggatgccgccaaaattctcattgtcatcactgatgggaagaaagaaggcgacagcctggattataaggatgtcatccccatggctgatgcagcaggcatcatccgctatgcaattggggttggattagcttttcaaaacagaaattcttggaaagaattaaatgacattgcatcgaagccctcccaggaacacatatttaaagtggaggactttgatgctctgaaagatattcaaaaccaactgaaggagaagatctttgccattgagggtacggagaccacaagcagtagctccttcgaattggagatggcacaggagggcttcagcgctgtgttcacacctgatggccccgttctgggggctgtggggagcttcacctggtctggaggtgccttcctgtaccccccaaatatgagccctaccttcatcaacatgtctcaggagaatgtggacatgagggactcttacctgggttactccaccgagctggccctctggaaaggggtgcagagcctggtcctgggggccccccgctaccagcacaccgggaaggctgtcatcttcacccaggtgtccaggcaatggaggatgaaggccgaagtcacggggactcagatcggctcctacttcggggcctccctctgctccgtggacgtagacagcgacggcagcaccgacctggtcctcatcggggccccccattactacgagcagacccgagggggccaggtgtctgtgtgtcccttgcccagggggtggagaaggtggtggtgtgatgctgttctctacggggagcagggccacccctggggtcgctttggggcggctctgacagtgctgggggatgtgaatggggacaagctgacagacgtggtcatcggggccccaggagaggaggagaaccggggtgctgtctacctgtttcacggagtcttgggacccagcatcagcccctcccacagccagcggatcgcgggctcccagctctcctccaggctgcagtattttgggcaggcactgagcgggggtcaagacctcacccaggatggactggtggacctggctgtgggggcccggggccaggtgctcctgctcaggtgacctccaaagctctgtgaccttggacctggccctcgaccctggccgcctgagtccccgtgccaccttccaggaaacaaagaac

SEQ ID NO: 551 - DNA, 3859 bp, Homo sapiens
tctctgcccacttgcttcctcagtaccttggtccagctcttcctgcaacggcccaggagctcagagctccacatctgaccttctagtcatgaccaggaccagggcagcactcctcctgttcacagccttagcaacttctctaggtttcaacttggacacagaggagctgacagccttccgtgtggacagcgctgggtttggagacagcgtggtccagtatgccaactcctgggtggtggttggagccccccaaaagataacagctgccaaccaaacgggtggcctctaccagtgtggctacagcactggtgcctgtgagcccatcggcctgcaggtgcccccggaggccgtgaacatgtccctgggcctgtccctggcgtctaccaccagcccttcccagctgctggcctgcggccccaccgtgcaccacgagtgcgggaggaacatgtacctcaccggactctgcttcctcctgggccccacccagctcacccagaggctcccggtgtccaggcaggagtgcccaagacaggagcaggacattgtgttcctgatcgatggctcaggcagcatctcctcccgcaactttgccacgatgatgaacttcgtgagagctgtgataagccagttccagagacccagcacccagttttccctgatgcagttctccaacaaattccaaacacacttcactttcgaggaattcaggcgcagctcaaaccccctcagcctgttggcttctgttcaccagctgcaagggtttacatacacggccaccgccatccaaaatgtcgtgcaccgattgttccatgcctcatatggggcccgtagggatgccgccaaaattctcattgtcatcactgatgggaagaaagaaggcgacagcctggattataaggatgtcatccccatggctgatgcagcaggcatcatccgctatgcaattggggttggattagcttttcaaaacagaaattcttggaaagaattaaatgacattgcatcgaagccctcccaggaacacatatttaaagtggaggactttgatgctctgaaagatattcaaaaccaactgaaggagaagatctttgccattgagggtacggagaccacaagcagtagctccttcgaattggagatggcacaggagggcttcagcgctgtgttcacacctgatggccccgttctgggggctgtggggagcttcacctggtctggaggtgccttcctgtaccccccaaatatgagccctaccttcatcaacatgtctcaggagaatgtggacatgagggactcttacctgggttactccaccgagctggccctctggaaaggggtgcagagcctggtcctgggggccccccgctaccagcacaccgggaaggctgtcatcttcacccaggtgtccaggcaatggaggatgaaggccgaagtcacggggactcagatcggctcctacttcggggcctccctctgctccgtggacgtagacagcgacggcagcaccgacctggtcctcatcggggccccccattactacgagcagacccgagggggccaggtgtctgtgtgtcccttgcccagggggtggagaaggtggtggtgtgatgctgttctctacggggagcagggccacccctggggtcgctttggggcggctctgacagtgctgggggatgtgaatggggacaagctgacagacgtggtcatcggggccccaggagaggaggagaaccggggtgctgtctacctgtttcacggagtcttgggacccagcatcagcccctcccacagccagcggatcgcgggctcccagctctcctccaggctgcagtattttgggcaggcactgagcgggggtcaagacctcacccaggatggactggtggacctggctgtgggggcccggggccaggtgctcctgctcaggaccagacctgtgctctgggtgggggtgagcatgcagttcatacctgccgagatccccaggtctgcgtttgagtgtcgggagcaggtggtctctgagcagaccctggtacagtccaacatctgcctttacattgacaaacgttctaagaacctgcttgggagccgtgacctccaaagctctgtgaccttggacctggccctcgaccctggccgcctgagtccccgtgccaccttccaggaaacaaagaaccggagtctgagccgagtccgagtcctcgggctgaaggcacactgtgaaaacttcaacctgctgctcccgagctgcgtggaggactctgtgacccccattaccttgcgtctgaacttcacgctggtgggcaagcccctccttgccttcagaaacctgcggcctatgctggccgccgatgctcagagatacttcacggcctccctaccctttgagaagaactgtggagccgaccatatctgccaggacaatctcggcatctccttcagcttcccaggcttgaagtccctgctggtggggagtaacctggagctgaacgcagaagtgatggtgtggaatgacggggaagactcctacggaaccaccatcaccttctcccaccccgcaggactgtcctaccgctacgtggcagagggccagaaacaagggcagctgcgttccctgcacctgacatgtgacagcgccccagttgggagccagggcacctggagcaccagctgcagaatcaaccacctcatcttccgtggcggcgcccagatcaccttcttggctacctttgacgtctcccccaaggctgtcctgggagaccggctgcttctgacagccaatgtgagcagtgagaacaacactcccaggaccagcaagaccaccttccagctggagctcccggtgaagtatgctgtctacactgtggttagcaggtcagcagccacgaacaattcaccaaatacctcaacttctcagagtctgaggagaaggaaagccatgtggccatgcacagataccaggtcaataacctgggacagagggacctgcctgtcagcatcaacttctgggtgcctgtggagctgaaccaggaggctgtgtggatggatgtggaggtctcccacccccagaacccatcccttcggtgctcctcagagaaaatcgcacccccagcatctgacttcctggcgcacattcagaagaatcccgtgctggactgctccattgctggctgcctgcggttccgctgtgacgtcccctccttcagcgtccaggaggagctggatttcaccctgaagggcaacctcagctttggctgggtccgccagatattgcagaagaaggtgtcggtcgtgagtgtggctgaaattacgttcgacacatccgtgtactcccagcttccaggacaggaggcatttatgagagctcagacgacaacggtgctggagaagtacaaggtccacaaccccacccccctcatcgtaggcagctccattgggggtctgttgctgctggcactcatcacagcggtactgtacaaagttggcttcttcaagcgtcagtacaaggaaatgatggaggaggcaaatggacaaattgccccagaaaacgggacacagacccccagcccgcccagtgagaaatgatcccctctttgccttggacttcttctcccccgcgagttttccccacttacttaccctcacctgtcaggcctgacggggaggaaccactgcaccaccgagagaggctgggatgggcctgcttcctgtctttgggagaaaacgtcttgcttgggaaggggcctttgtcttgtcaaggttccaactggaaacccttaggacagggtccctgctgtgttccccaaaggacttgacttgcaatttctacctagaaatacatggacaatacccccag

SEQ ID NO: 552 - DNA, 10857 bp, Homo sapiens
cataaatgatgaaagtttcctgtgaagcataacaatccctgattgtgaaagtaccccacaagcatcgttaactataaagtaaggaaaagtatgaaagaaccatctggttgagtctaaagttggaagatcaccatatccaccagaagacccaggatggatctgcaacaaagcaccaccatcacttccctagagaaatggtgtttggatgagtcactgtctggctgcagaagacattatagtgtcaagaaaaaactgaagttaattcgagtcttaggccttttcatgggtctggtagccattagcactgtctcattttcaatcagtgccttttctgagacagatacacagagcacaggagaggccagtgttgtaagtggccctagggtagcacagggttaccatcagagaactctcttagatttaaatgacaagattctggattatactccacagccacctctttctaaggaaggcgagtctgagaatagtacagatcacgcccaaggagactacccgaaagacatcttttcccttgaggagagaagaaaaggtgcgatcattctgcatgtcattggaatgatctacatgttcatagccttagccattgtctgtgatgagttctttgttccttctttgactgtcatcactgaaaaactgggcatctctgatgatgtggctggagccaccttcatggctgcaggagggtcagccccagaacttttcacatctctcataggggtatttatcgctcacagcaacgttggcataggcacaattgtaggttcagcagtattcaacatcctctttgttattggcatgtgtgctctgttttctagagaaatcttaaacctgacatggtggccgctctttcgagatgtgtctttctacattgttgacttgatcatgctgatcatatttttcctggataatgtcatcatgtggtgggaaagcttgcttctcttaacagcttatttttgctatgtggttttcatgaaattcaacgtccaagtagaaaaatgggtgaagcaaatgataaaccgcaataaggtcgtcaaggtgacagcaccagaagcccaagcaaagccatctgcagccagggacaaggatgaaccaactctaccggctaagccgcgtctccagcgaggtggaagctctgcctccctccacaacagtctcatgaggaatagcatcttccaactcatgatacacacccttgacccactcgccgaagaacttggatcatatggaaaactaaaatattatgacacaatgactgaagaagggaggttcagagaaaaggcttcaattctccacaagatcgccaagaagaaatgtcatgtggatgagaacgagaggcagaatggggctgccaaccacgtggaaaaaattgagcttccaaacagcaccagcacagatgttgaaatgacaccatccagtgatgcttcagaacctgtacaaaatggaaatctctcccacaacattgaaggtgcagaagcccagaccgctgatgaggaggaggaccagcctctcagccttgcctggccttctgaaacccgcaagcaagtcacgtttctgattgttttccccatagtgtttcctctctggattacgttacctgacgttcgcaaaccttcatcgaggaagttttttcccatcacgttctttggctccattacctggattgcagtattctcttacttgatggtctggtgggcgcaccaggttggagagacaattggcatcagtgaagagattatgggcctgaccatcttggctgctgggacctccatccctgatcttatcaccagtgtcatagtggcccggaaggggttaggggacatggctgtgtccagctctgttggaagcaacatttttgacatcactgtagggctcccactgccctggctcctgtacaccgtcattcacagattccagccagtggctgtcagcagcaatggccttttctgtgccatcgtccttctcttcatcatgctgctcttcgtcatcctctctatcgccctctgcaagtggcgaatgaacaaaatcctgggcttcatcatgtttggcctctactttgtgttcctggtggtgagcgttctcctagaagacagaattcttacatgccccgtctccatctagcaggaaaagccatatcttgcaccagcagcatgaatggtccctccacactctgggctctgggctccttgacctcttgagaagaggcagctggcacacagccctgggtgccaagtgtccctccttggtgaatttgaggagagatggattcacactgggcccattcacttcacaggctgcttccaccctgcctactgaaatgacttcatgtaaaagacaaagagaaccgtcaatacagggcttctccctattcaccactgacaagtacacctcgctggtcggaggtacagtcgatgcaaacaaggacacaggctatatatatctataaatacacatattataaatatacgcacatgaacacacaaatcctgcctgttcctgtactatacctctccttgcatacctatagattagtacatacctgtaaataaagacaaagaaaaattatatatatatatataaaatcagatatatataaaagtacaaatgcatcttttcagggatagctctagtatatttatagtacttatttgaagaggggcatcaacttgcagtctgggctttacctcttaagtacaagaggtgaactaatggaaccaacaagacaaaggtagcattgctgtgaccttcagcctaccttggacttgctgtgatcctgcctagtaaggtagatggtttagggaaatagcttgcagggaggagggcttagtggagaaggtctgtaggggccctgagttgagccttccaaaacattcctacaagccaaacagagagactatctgcccacctccaccagagtaccctgaccaagaaactcagggtacttaggacagaaagaggtaaaaacccaggctgggtggcttggtttggggaagtggggaggtaaccagggttgggttgttttgttttgttcttatattgtcccagcatgcaagtagaaaatatgactacaaaccaaattagtgctttttctaggacagcaagactatataaactgaacctgtatttttccagcgcatgtcccattatcatcaaaagaagaggggtaagtttagctgtgattgtcatgtagatatattttgatgctaagggctgccaagagagcctagatgtgcaataagaagtcatccagtaaaggtgcttagtgggccttgccacctaatgggatgtaagggcatagttctttaaaacgttttccagtgtagtcataaagggctttagtgtctgaagaaatcattattcccaatagcactaacttaactctgatcagcactgcttgggttgaggcaacttagcgatgcttggaaaggcatttgcacactcagtgcaccccaggaaggtttctgagtgccaggtcgagtggtaccaggaccaggctttggttaaagttcttgtaacatctatgtctcttcttccatcaagaccttatctgggattctgtctaagttttagagtacacggtatttgacagcttccttatactggtttcaagctattcactccaacaatttgatttcttgattttgctcaacattacattgaatgcatgaaattaaaatattccacgcccccaagttctgtatgacaccttgtgtgttttctcagatctatgtcagtcgaaaataaagccagcaagggggaaaaaataggcaaactgaatcaatggaaaactatgtagagcacttttcttttctccaagtcatgctttccttaaaatcagttgaaaaattgaatcaaggatggttcattattctgtacccatcctacgtctaagttggtacatatggcatatgggaaatttcaccatatgtgttcctatctccaatctattctgtcattgacgcctgctatgattttgttgtgagcacatacctcttaacataagaggacaggatgcagaactcacagcagaataagaggaaaggtaacctgacagccccagatcaagctcagtattccttccagaaaacctcagctcaccccacagagcatggcaataacaggaaatgcccatcattcctcttcacccagaagtaaaaagcacttcaaacccgaggccccctgggaaaacaagaaatcaagatggctgccagtcggaggctggctttcaagtctctccaactcggcagattggggtcttcagatgtgggacaatgccttccaagacattgaaacaccatccaatagaggcgctgagtggaacctgccacctaatgggaatgaatctcattcatcaaggtcaggactttgtactggggcaagaatttgtcctgcttccttagagagtgaaagaatgaggaagtgaactttacgtttaaaaactccagttgttttccctgtgtatttcttgaagggcaaccaagttggttattgtgtgaattttatattattgactggtgcgttgtttgaaataaggtttaaataggtgactgactcaactgcaaacagaccatgtaaaacagaagttgaaggagacctgatgccgccctcttcttattcctgatcctccctctgcctcctcactccctcccatttattcccagcttacagtgaaggctgatcaaagcagctatggtgccctttgcttgtctcggagctccacttcacaggaagtgttgtggtctttcatgtgaagttgcatttgagaagacaaaatttccaagccccgttcccacatcagtcatgtgcactgagcctgacctacaacagcactgctccctcactggatgggacacaagtgattccacagcctgcccttgctttcccttcatttctgtgtctgtaagtggttatgtgttgagccagggtaaattcagagagatgtgtacagagttcaacaatgggtctttaaaccattcaaatcattggcataattataagaactttccacaccgtggtttccaaaacaggtcatctctaactcgtttcctgcatgcctgtgtatatacatatataaatatatacatatatatatatatacatatatatatatatatatatatctttataccagatctatatgtacacatataatatgacttacatcatcaccctctgaccctatcacattcaggattctaaagcagggagcatcaagtttgccaaagtcaaggaaaaggaaagtcatgcacacaaaccaaagggaacatttcttcctgatttcataaggttgtttgttccatgcacatatatttacaaatatacacatatgtacccatattttcccaccctaagaatatcaatttatagccttaaggaaatcggtcagccatatccctaatgctgatatagaggcaaagaatacacaacagaaaatacaaagcaaaaatttagactgcagatactctctttgcttctctggagcagggtataaaagatatcaacaattcaagagccaacattgtactaatcaatctaaaataaatgagttgcacgcaaatgatttcatttattcacagcaaaccgagcaggtcttgcttgctgtcaccgcctaccctcccccatacttccaaggcagcagagcagcttggctcaaactgacaattcccaaatagaaactcctaaattgcatctgagaatgcccatgccaactccagctgccctctgcacctgaccagatcctgatgaactgaagctgaagatcagatggtgtttatgcagcttcccaggacctaaactgagtcaggcagtgacagagcaatgatatatgcagggactaagggatagggttgtttataccctcggcagatgcagcagaatgtcctaaagccttgcccagaagattataaaaagaggcggagactgttttatattcaggaaaaatgctttgtaaggcttctaacaggtgtcacctgacaagggccatcataatttattttatagggaagacatgaatcaggtggtttggagccctttcagcaaaacgcagctgcctcgctgattagacatttgacaatgttaatgtacatccattcctgggcagggagagagttggcaaactccccaccactgcacatagcttttaaaggcctctggaacagtgagagaagagatgagctacaaagggagcccacccccagaccactttaacaaaaagttgaccaaagaaaagacacctggtagagtggctggccagatagagctgaagaagatggaagttgcattaaatgctctgcagaaattactgcgttggactatctaacatgggtctgatggcaggcatttcagaacatggcagtgtgctttcctccccacatctaccaaacacacacccacacccccacacacacgcgagattatgtggatgctatgcctccttgcacctggacagattgtttttctggtaagtaggtggccctattataggtggcagctgtgttccagaagaaacaaagtgaagctgttctcagggtgatttctggagaaaactactgtctcctgaaagcatgcatagaagtcagtgctcactcttgctaagccacatattccttaacgatccggcttaatatttttaaaagatacctcctcaacccctatacctgtctcaacaatactgtcttcaattattaggtaaggccttgtcattaagagaggggtaggagaaaaaatagaataataaggaaagggaagaaaggagatattaatttcctaggattccaagaaaacaagtgtcacgtggaaatatatccctatgtagtttaaaacagtaacaaatatcaggctatgtttagccaattacaagagcccatatacagttttagatttttttaaaaaataatctcaggaagaccttgggtaagaaaagtaaccctgccctattccaccttctatttactgttagctccctgactctgcctctgcctctgtctttgcgtttcatttttaatctcagagcttcatattttttaaatatatagcaaacaagaaaagcaataagggaactactcacagccagctcaactctattacttatgattacaccatggcaatattcctttttcaccaggagctttggacctgcgcaggttgtggcatgtaatcacccggagcatgtagtcgtctgtagaaatcacaggcacactcatgtttgctctggaaggaatctgttttccacaatgactccccccagctaatgtacacactggcattttgcatgccttcctcacacatggggcaccagccttgctcagaaccacccaaactccacagaggcccttaatatggctagggacagatttcttaagaaagagtaagaagcagctacaaaggacaagcaaatccacaagtcaggcagcattcgagaggcaaaaatgaccctgcaattacgacaggctaggcaactgttttcaaattagcgtacgaacagtgagggactgtgtagagcaccatattatctaagccaaagcacttctaccagatcattcattgacagactggaaaacctaataaaatctttaaaaacagacaaatatctaagtctgaaagaatgccatggagtttgcctaggcttccaccaaagatttaattccattaagagggtttgtctagcctatcacgctaatccaaaggacagtcctcttacgggggagatcccagcatagatgctggtgtgacccagctcaatgattaacaaccatcagcatcaagaaaagcctccctccaagttaacccaaacccatccacttaatgacttaactttttttttttttttttttttttttggcaaaaagtaactgcatctgggcactcttcactctttgccccatagttggaagttaccgctatgtgactctttacctattttcaattaaaattatctttagatttttatttgagtctttaaccctcttaataatttttatagttcctctctactaagcctttttaagttctttatattgttcttaaatgatggaaccttatgactaatgataatcactgtctgaacagtgttgaactatactgggtgcagcatgaccatgaagctctggtgaagtcaaggtcacaaactgcttttaaggtcattaggtcataatctcagactcacaaagaactcaaaattggggagacaccactttagattactccaaaactctgggcctgtacttacccactaatttatcaagaggaatcaatatttttattttaaatatgaaactgggataaatgattggatctccacttattaaccagtactgcagtgtgtttatatccttttgtgtggtaggttggataggatttgtaaagctactgattgatctcatgggccagggttcaccaaaaggatgggaatttgtttctgcattcttacatattgggttgcatattccttcataatggatccataagtaactaaggccttggagactaacagttctccaaaatactcagctaaccaaaagaaaatactaatttttaaaatcatgtcataaaaaacagaaaagtaaaaaaagtctgaaatcctgaataaaattattttaaggatgaaattacatgcataaattaagggtagataacttcttgccatttaattaaacaaatccccaattcttatcagaataaaactgaaggacaatggatgccttttgggttttttaattttttaatattgcactttatagtacttcataagagacaactgtcttaattaaagccataaaataccaataatacatatattcagggcttctgaatatagtcaatcaataagcagtccatgagtcattcctgttttgtattgtttattgtaaattggagtttatctgttctattttttattaactacaattattgttctaggcaatcctaatctacttatacattttagatgtgtgctttaataaaactgtttgaaaatcaaagaaattattcatttcacaaaagcagtcttcgttttcaaaatagcttattacagtttctttagcaagttctaatactacatggaaattattttaaaattgtagatttttttcaggaatccattttgttatataaagcaaagttcacccatatggaaaatgaaatagataattagcaaacatatacctgggaaatgtaggatgtgtttgagcttttatataaatataggatgggtctaagaagttcccttataaaaatgggaaatagaggtatacaatttatcaataattccttatgcctaaattactaaccttccttgggaggacatgtaaagcagcagatttcataatgctttggtggttattttcctcctctccgctaaaatacacaatttctaacctagtatggtacactgtttacacacacatatataaagatgtccccacaactaaaaactttaatgtttcaacttcatcacaaatttttatataattttttttttaacagacagggtcttgctctgtcacccaggctagagtgcagtggtgcaatcatagctcagtgtagcctcaaacacctggactcaagcgatcctcccacttcagcctcttgagtagctgggacctcaggcacatgccaccatgcctggctaattttgttgttgttgttaagagatggagtctcactatgttacccaggctggtctcaaactcctgggctcaagagatcctcctgctttggcctcccaaagtgctgggattaaaggaatgagccaccatacccagcccttttatgtaatttgagtaaaagtaattactaaaaagcacttaatagtctagaaatccaccagaactgggtacctaaattgtccatatagagtaaacatgggtactaaactggacaaccccatcaattttatgcttaagtggccaaattgccctaaagaaagggtatctgaaccaagggccagtgatattcctctgttagaggctgttttgtggtctgaagagtttctctaaagggctgagactctattcggaagagggagcctcagttactgaattgcgctattgaaccctgaacacaaagtacacatatataccctgcatctagccttgatatttcttctgctcaagtcaaaaaactccggaagcaacagcttccaccatcaagcaatccacatacttaaaaagccatcaaagctaagaatagcaaaagctaccttcctgattcagtgaagttgctgctagcactaaaagcaagagaaattatacttttgttcttcagatacggttaaaacaaagaaaatgttgtcaacgttgacgccaacatagacatttgctctataacatataaactgtcttttagacaggttatgttaaaaatatcagaatgccatttttgtaaaggatcttttttaggatagacgtggtctcatgcttcctttgttcgcctccgttttaaaggagcattgtaacccctatcctcatccctacaaaaatccagtggatgcacttccaaattacttctgtcattttgtatgtgttgtgtttattatgcgtaattttcactggatgatgagatacatggtgatactatgtcagtttattctctgtgaatatgtctgtacatagacaggaagctctacttatttgtacataggctgtctgaagtatgtacttctgtcacatggacttcattctgataaagggtgtttcttcttgtttcactgtccatacctttgtgcttctactactgataatcaattcatagaatatcactttatgtaactaagtctcctcagtgtgaaaaataatagtaataaaattattgactcaaagaagtaaaaaaaaaaaaaaaaaa

SEQ ID NO: 553 - DNA, 10806 bp, Homo sapiens
cataaatgatgaaagtttcctgtgaagcataacaatccctgattgtgaaagtaccccacaagcatcgttaactataaagtaaggaaaagtatgaaagaaccatctggttgagtctaaagttggaagatcaccatatccaccagaagacccaggatggatctgcaacaaagcaccaccatcacttccctagagaaatggtgtttggatgagtcactgtctggctgcagaagacattatagtgtcaagaaaaaactgaagttaattcgagtcttaggccttttcatgggtctggtagccattagcactgtctcattttcaatcagtgccttttctgagacagatacacagagcacaggagaggccagtgttgtaagtggccctagggtagcacagggttaccatcagagaactctcttagatttaaatgacaagattctggattatactccacagccacctctttctaaggaaggcgagtctgagaatagtacagatcacgcccaaggagactacccgaaagacatcttttcccttgaggagagaagaaaaggtgcgatcattctgcatgtcattggaatgatctacatgttcatagccttagccattgtctgtgatgagttctttgttccttctttgactgtcatcactgaaaaactgggcatctctgatgatgtggctggagccaccttcatggctgcaggagggtcagccccagaacttttcacatctctcataggggtatttatcgctcacagcaacgttggcataggcacaattgtaggttcagcagtattcaacatcctctttgttattggcatgtgtgctctgttttctagagaaatcttaaacctgacatggtggccgctctttcgagatgtgtctttctacattgttgacttgatcatgctgatcatatttttcctggataatgtcatcatgtggtgggaaagcttgcttctcttaacagcttatttttgctatgtggttttcatgaaattcaacgtccaagtagaaaaatgggtgaagcaaatgataaaccgcaataaggtcgtcaaggtgacagcaccagaagcccaagcaaagccatctgcagccagggacaaggatgaaccaactctaccggctaagccgcgtctccagcgaggtggaagctctgcctccctccacaacagtctcatgaggaatagcatcttccaactcatgatacacacccttgacccactcgccgaagggaggttcagagaaaaggcttcaattctccacaagatcgccaagaagaaatgtcatgtggatgagaacgagaggcagaatggggctgccaaccacgtggaaaaaattgagcttccaaacagcaccagcacagatgttgaaatgacaccatccagtgatgcttcagaacctgtacaaaatggaaatctctcccacaacattgaaggtgcagaagcccagaccgctgatgaggaggaggaccagcctctcagccttgcctggccttctgaaacccgcaagcaagtcacgtttctgattgttttccccatagtgtttcctctctggattacgttacctgacgttcgcaaaccttcatcgaggaagttttttcccatcacgttctttggctccattacctggattgcagtattctcttacttgatggtctggtgggcgcaccaggttggagagacaattggcatcagtgaagagattatgggcctgaccatcttggctgctgggacctccatccctgatcttatcaccagtgtcatagtggcccggaaggggttaggggacatggctgtgtccagctctgttggaagcaacatttttgacatcactgtagggctcccactgccctggctcctgtacaccgtcattcacagattccagccagtggctgtcagcagcaatggccttttctgtgccatcgtccttctcttcatcatgctgctcttcgtcatcctctctatcgccctctgcaagtggcgaatgaacaaaatcctgggcttcatcatgtttggcctctactttgtgttcctggtggtgagcgttctcctagaagacagaattcttacatgccccgtctccatctagcaggaaaagccatatcttgcaccagcagcatgaatggtccctccacactctgggctctgggctccttgacctcttgagaagaggcagctggcacacagccctgggtgccaagtgtccctccttggtgaatttgaggagagatggattcacactgggcccattcacttcacaggctgcttccaccctgcctactgaaatgacttcatgtaaaagacaaagagaaccgtcaatacagggcttctccctattcaccactgacaagtacacctcgctggtcggaggtacagtcgatgcaaacaaggacacaggctatatatatctataaatacacatattataaatatacgcacatgaacacacaaatcctgcctgttcctgtactatacctctccttgcatacctatagattagtacatacctgtaaataaagacaaagaaaaattatatatatatatataaaatcagatatatataaaagtacaaatgcatcttttcagggatagctctagtatatttatagtacttatttgaagaggggcatcaacttgcagtctgggctttacctcttaagtacaagaggtgaactaatggaaccaacaagacaaaggtagcattgctgtgaccttcagcctaccttggacttgctgtgatcctgcctagtaaggtagatggtttagggaaatagcttgcagggaggagggcttagtggagaaggtctgtaggggccctgagttgagccttccaaaacattcctacaagccaaacagagagactatctgcccacctccaccagagtaccctgaccaagaaactcagggtacttaggacagaaagaggtaaaaacccaggctgggtggcttggtttggggaagtggggaggtaaccagggttgggttgttttgttttgttcttatattgtcccagcatgcaagtagaaaatatgactacaaaccaaattagtgctttttctaggacagcaagactatataaactgaacctgtatttttccagcgcatgtcccattatcatcaaaagaagaggggtaagtttagctgtgattgtcatgtagatatattttgatgctaagggctgccaagagagcctagatgtgcaataagaagtcatccagtaaaggtgcttagtgggccttgccacctaatgggatgtaagggcatagttctttaaaacgttttccagtgtagtcataaagggctttagtgtctgaagaaatcattattcccaatagcactaacttaactctgatcagcactgcttgggttgaggcaacttagcgatgcttggaaaggcatttgcacactcagtgcaccccaggaaggtttctgagtgccaggtcgagtggtaccaggaccaggctttggttaaagttcttgtaacatctatgtctcttcttccatcaagaccttatctgggattctgtctaagttttagagtacacggtatttgacagcttccttatactggtttcaagctattcactccaacaatttgatttcttgattttgctcaacattacattgaatgcatgaaattaaaatattccacgcccccaagttctgtatgacaccttgtgtgttttctcagatctatgtcagtcgaaaataaagccagcaagggggaaaaaataggcaaactgaatcaatggaaaactatgtagagcacttttcttttctccaagtcatgctttccttaaaatcagttgaaaaattgaatcaaggatggttcattattctgtacccatcctacgtctaagttggtacatatggcatatgggaaatttcaccatatgtgttcctatctccaatctattctgtcattgacgcctgctatgattttgttgtgagcacatacctcttaacataagaggacaggatgcagaactcacagcagaataagaggaaaggtaacctgacagccccagatcaagctcagtattccttccagaaaacctcagctcaccccacagagcatggcaataacaggaaatgcccatcattcctcttcacccagaagtaaaaagcacttcaaacccgaggccccctgggaaaacaagaaatcaagatggctgccagtcggaggctggctttcaagtctctccaactcggcagattggggtcttcagatgtgggacaatgccttccaagacattgaaacaccatccaatagaggcgctgagtggaacctgccacctaatgggaatgaatctcattcatcaaggtcaggactttgtactggggcaagaatttgtcctgcttccttagagagtgaaagaatgaggaagtgaactttacgtttaaaaactccagttgttttccctgtgtatttcttgaagggcaaccaagttggttattgtgtgaattttatattattgactggtgcgttgtttgaaataaggtttaaataggtgactgactcaactgcaaacagaccatgtaaaacagaagttgaaggagacctgatgccgccctcttcttattcctgatcctccctctgcctcctcactccctcccatttattcccagcttacagtgaaggctgatcaaagcagctatggtgccctttgcttgtctcggagctccacttcacaggaagtgttgtggtctttcatgtgaagttgcatttgagaagacaaaatttccaagccccgttcccacatcagtcatgtgcactgagcctgacctacaacagcactgctccctcactggatgggacacaagtgattccacagcctgcccttgctttcccttcatttctgtgtctgtaagtggttatgtgttgagccagggtaaattcagagagatgtgtacagagttcaacaatgggtctttaaaccattcaaatcattggcataattataagaactttccacaccgtggtttccaaaacaggtcatctctaactcgtttcctgcatgcctgtgtatatacatatataaatatatacatatatatatatatacatatatatatatatatatatatctttataccagatctatatgtacacatataatatgacttacatcatcaccctctgaccctatcacattcaggattctaaagcagggagcatcaagtttgccaaagtcaaggaaaaggaaagtcatgcacacaaaccaaagggaacatttcttcctgatttcataaggttgtttgttccatgcacatatatttacaaatatacacatatgtacccatattttcccaccctaagaatatcaatttatagccttaaggaaatcggtcagccatatccctaatgctgatatagaggcaaagaatacacaacagaaaatacaaagcaaaaatttagactgcagatactctctttgcttctctggagcagggtataaaagatatcaacaattcaagagccaacattgtactaatcaatctaaaataaatgagttgcacgcaaatgatttcatttattcacagcaaaccgagcaggtcttgcttgctgtcaccgcctaccctcccccatacttccaaggcagcagagcagcttggctcaaactgacaattcccaaatagaaactcctaaattgcatctgagaatgcccatgccaactccagctgccctctgcacctgaccagatcctgatgaactgaagctgaagatcagatggtgtttatgcagcttcccaggacctaaactgagtcaggcagtgacagagcaatgatatatgcagggactaagggatagggttgtttataccctcggcagatgcagcagaatgtcctaaagccttgcccagaagattataaaaagaggcggagactgttttatattcaggaaaaatgctttgtaaggcttctaacaggtgtcacctgacaagggccatcataatttattttatagggaagacatgaatcaggtggtttggagccctttcagcaaaacgcagctgcctcgctgattagacatttgacaatgttaatgtacatccattcctgggcagggagagagttggcaaactccccaccactgcacatagcttttaaaggcctctggaacagtgagagaagagatgagctacaaagggagcccacccccagaccactttaacaaaaagttgaccaaagaaaagacacctggtagagtggctggccagatagagctgaagaagatggaagttgcattaaatgctctgcagaaattactgcgttggactatctaacatgggtctgatggcaggcatttcagaacatggcagtgtgctttcctccccacatctaccaaacacacacccacacccccacacacacgcgagattatgtggatgctatgcctccttgcacctggacagattgtttttctggtaagtaggtggccctattataggtggcagctgtgttccagaagaaacaaagtgaagctgttctcagggtgatttctggagaaaactactgtctcctgaaagcatgcatagaagtcagtgctcactcttgctaagccacatattccttaacgatccggcttaatatttttaaaagatacctcctcaacccctatacctgtctcaacaatactgtcttcaattattaggtaaggccttgtcattaagagaggggtaggagaaaaaatagaataataaggaaagggaagaaaggagatattaatttcctaggattccaagaaaacaagtgtcacgtggaaatatatccctatgtagtttaaaacagtaacaaatatcaggctatgtttagccaattacaagagcccatatacagttttagatttttttaaaaaataatctcaggaagaccttgggtaagaaaagtaaccctgccctattccaccttctatttactgttagctccctgactctgcctctgcctctgtctttgcgtttcatttttaatctcagagcttcatattttttaaatatatagcaaacaagaaaagcaataagggaactactcacagccagctcaactctattacttatgattacaccatggcaatattcctttttcaccaggagctttggacctgcgcaggttgtggcatgtaatcacccggagcatgtagtcgtctgtagaaatcacaggcacactcatgtttgctctggaaggaatctgttttccacaatgactccccccagctaatgtacacactggcattttgcatgccttcctcacacatggggcaccagccttgctcagaaccacccaaactccacagaggcccttaatatggctagggacagatttcttaagaaagagtaagaagcagctacaaaggacaagcaaatccacaagtcaggcagcattcgagaggcaaaaatgaccctgcaattacgacaggctaggcaactgttttcaaattagcgtacgaacagtgagggactgtgtagagcaccatattatctaagccaaagcacttctaccagatcattcattgacagactggaaaacctaataaaatctttaaaaacagacaaatatctaagtctgaaagaatgccatggagtttgcctaggcttccaccaaagatttaattccattaagagggtttgtctagcctatcacgctaatccaaaggacagtcctcttacgggggagatcccagcatagatgctggtgtgacccagctcaatgattaacaaccatcagcatcaagaaaagcctccctccaagttaacccaaacccatccacttaatgacttaactttttttttttttttttttttttttggcaaaaagtaactgcatctgggcactcttcactctttgccccatagttggaagttaccgctatgtgactctttacctattttcaattaaaattatctttagatttttatttgagtctttaaccctcttaataatttttatagttcctctctactaagcctttttaagttctttatattgttcttaaatgatggaaccttatgactaatgataatcactgtctgaacagtgttgaactatactgggtgcagcatgaccatgaagctctggtgaagtcaaggtcacaaactgcttttaaggtcattaggtcataatctcagactcacaaagaactcaaaattggggagacaccactttagattactccaaaactctgggcctgtacttacccactaatttatcaagaggaatcaatatttttattttaaatatgaaactgggataaatgattggatctccacttattaaccagtactgcagtgtgtttatatccttttgtgtggtaggttggataggatttgtaaagctactgattgatctcatgggccagggttcaccaaaaggatgggaatttgtttctgcattcttacatattgggttgcatattccttcataatggatccataagtaactaaggccttggagactaacagttctccaaaatactcagctaaccaaaagaaaatactaatttttaaaatcatgtcataaaaaacagaaaagtaaaaaaagtctgaaatcctgaataaaattattttaaggatgaaattacatgcataaattaagggtagataacttcttgccatttaattaaacaaatccccaattcttatcagaataaaactgaaggacaatggatgccttttgggttttttaattttttaatattgcactttatagtacttcataagagacaactgtcttaattaaagccataaaataccaataatacatatattcagggcttctgaatatagtcaatcaataagcagtccatgagtcattcctgttttgtattgtttattgtaaattggagtttatctgttctattttttattaactacaattattgttctaggcaatcctaatctacttatacattttagatgtgtgctttaataaaactgtttgaaaatcaaagaaattattcatttcacaaaagcagtcttcgttttcaaaatagcttattacagtttctttagcaagttctaatactacatggaaattattttaaaattgtagatttttttcaggaatccattttgttatataaagcaaagttcacccatatggaaaatgaaatagataattagcaaacatatacctgggaaatgtaggatgtgtttgagcttttatataaatataggatgggtctaagaagttcccttataaaaatgggaaatagaggtatacaatttatcaataattccttatgcctaaattactaaccttccttgggaggacatgtaaagcagcagatttcataatgctttggtggttattttcctcctctccgctaaaatacacaatttctaacctagtatggtacactgtttacacacacatatataaagatgtccccacaactaaaaactttaatgtttcaacttcatcacaaatttttatataattttttttttaacagacagggtcttgctctgtcacccaggctagagtgcagtggtgcaatcatagctcagtgtagcctcaaacacctggactcaagcgatcctcccacttcagcctcttgagtagctgggacctcaggcacatgccaccatgcctggctaattttgttgttgttgttaagagatggagtctcactatgttacccaggctggtctcaaactcctgggctcaagagatcctcctgctttggcctcccaaagtgctgggattaaaggaatgagccaccatacccagcccttttatgtaatttgagtaaaagtaattactaaaaagcacttaatagtctagaaatccaccagaactgggtacctaaattgtccatatagagtaaacatgggtactaaactggacaaccccatcaattttatgcttaagtggccaaattgccctaaagaaagggtatctgaaccaagggccagtgatattcctctgttagaggctgttttgtggtctgaagagtttctctaaagggctgagactctattcggaagagggagcctcagttactgaattgcgctattgaaccctgaacacaaagtacacatatataccctgcatctagccttgatatttcttctgctcaagtcaaaaaactccggaagcaacagcttccaccatcaagcaatccacatacttaaaaagccatcaaagctaagaatagcaaaagctaccttcctgattcagtgaagttgctgctagcactaaaagcaagagaaattatacttttgttcttcagatacggttaaaacaaagaaaatgttgtcaacgttgacgccaacatagacatttgctctataacatataaactgtcttttagacaggttatgttaaaaatatcagaatgccatttttgtaaaggatcttttttaggatagacgtggtctcatgcttcctttgttcgcctccgttttaaaggagcattgtaacccctatcctcatccctacaaaaatccagtggatgcacttccaaattacttctgtcattttgtatgtgttgtgtttattatgcgtaattttcactggatgatgagatacatggtgatactatgtcagtttattctctgtgaatatgtctgtacatagacaggaagctctacttatttgtacataggctgtctgaagtatgtacttctgtcacatggacttcattctgataaagggtgtttcttcttgtttcactgtccatacctttgtgcttctactactgataatcaattcatagaatatcactttatgtaactaagtctcctcagtgtgaaaaataatagtaataaaattattgactcaaagaagtaaaaaaaaaaaaaaaaaa

SEQ ID NO: 554 - DNA, 11651 bp, Homo sapiens
attctatttcttgtggtcaaggggatcttgctttccagataggacaggaaggagcactgggctggacatcccgaggccaaaagccgaagcctgtcagtgattcaaaatgacacggggttttgggtctcactttcatcacccatgaaatgaaaggtcaccctgcaagactgaagcccctgcagtgtcccaagcatccaaatccaacactcaagaaaccctggaccccaacagcctgtcctgcaggcctccgtgccttttcattgaacgtcttttccaccattacacatcacatcgcctcctaaagaaaagcgcgactgctatcactttttgcagataattggagaggcggtgcccagcataagatgaccccaaagttgacagcactttcaggctttgtgaattaggcgcgtcaccgacctgtacgatttctcctctctgcccttgctcgcctgcaaatcctgacccccgtccacactgcggagaaatctcctaagagacggctgccagcgtcgcctctgcgcccaggaggcgtggagcaaaggactcgggagctgagcgcgctgcggccccgctcccagcgcacagcgcacagcccagagggaggggccggcgggggccgggcagcgccagactcggagcgccgggctcacagcggctcagtctcctcccgaacccagcccggctggcgagagcggcagccagtgcgagccagagcccgggcctcagagcgggtaggcggagggccggcggactggagcggcgggccgcgctcgggggccccgccgtgtgcgcgtcctcccatcttatcctgcataaatgatgaaagtttcctgtgaagcataacaatccctgattgtgaaagtaccccacaagcatcgttaactataaagtaaggaaaagtatgaaagaaccatctggttgagtctaaagttggaagatcaccatatccaccagaagacccaggatggatctgcaacaaagcaccaccatcacttccctagagaaatggtgtttggatgagtcactgtctggctgcagaagacattatagtgtcaagaaaaaactgaagttaattcgagtcttaggccttttcatgggtctggtagccattagcactgtctcattttcaatcagtgccttttctgagacagatacacagagcacaggagaggccagtgttgtaagtggccctagggtagcacagggttaccatcagagaactctcttagatttaaatgacaagattctggattatactccacagccacctctttctaaggaaggcgagtctgagaatagtacagatcacgcccaaggagactacccgaaagacatcttttcccttgaggagagaagaaaaggtgcgatcattctgcatgtcattggaatgatctacatgttcatagccttagccattgtctgtgatgagttctttgttccttctttgactgtcatcactgaaaaactgggcatctctgatgatgtggctggagccaccttcatggctgcaggagggtcagccccagaacttttcacatctctcataggggtatttatcgctcacagcaacgttggcataggcacaattgtaggttcagcagtattcaacatcctctttgttattggcatgtgtgctctgttttctagagaaatcttaaacctgacatggtggccgctctttcgagatgtgtctttctacattgttgacttgatcatgctgatcatatttttcctggataatgtcatcatgtggtgggaaagcttgcttctcttaacagcttatttttgctatgtggttttcatgaaattcaacgtccaagtagaaaaatgggtgaagcaaatgataaaccgcaataaggtcgtcaaggtgacagcaccagaagcccaagcaaagccatctgcagccagggacaaggatgaaccaactctaccggctaagccgcgtctccagcgaggtggaagctctgcctccctccacaacagtctcatgaggaatagcatcttccaactcatgatacacacccttgacccactcgccgaagaacttggatcatatggaaaactaaaatattatgacacaatgactgaagaagggaggttcagagaaaaggcttcaattctccacaagatcgccaagaagaaatgtcatgtggatgagaacgagaggcagaatggggctgccaaccacgtggaaaaaattgagcttccaaacagcaccagcacagatgttgaaatgacaccatccagtgatgcttcagaacctgtacaaaatggaaatctctcccacaacattgaaggtgcagaagcccagaccgctgatgaggaggaggaccagcctctcagccttgcctggccttctgaaacccgcaagcaagtcacgtttctgattgttttccccatagtgtttcctctctggattacgttacctgacgttcgcaaaccttcatcgaggaagttttttcccatcacgttctttggctccattacctggattgcagtattctcttacttgatggtctggtgggcgcaccaggttggagagacaattggcatcagtgaagagattatgggcctgaccatcttggctgctgggacctccatccctgatcttatcaccagtgtcatagtggcccggaaggggttaggggacatggctgtgtccagctctgttggaagcaacatttttgacatcactgtagggctcccactgccctggctcctgtacaccgtcattcacagattccagccagtggctgtcagcagcaatggccttttctgtgccatcgtccttctcttcatcatgctgctcttcgtcatcctctctatcgccctctgcaagtggcgaatgaacaaaatcctgggcttcatcatgtttggcctctactttgtgttcctggtggtgagcgttctcctagaagacagaattcttacatgccccgtctccatctagcaggaaaagccatatcttgcaccagcagcatgaatggtccctccacactctgggctctgggctccttgacctcttgagaagaggcagctggcacacagccctgggtgccaagtgtccctccttggtgaatttgaggagagatggattcacactgggcccattcacttcacaggctgcttccaccctgcctactgaaatgacttcatgtaaaagacaaagagaaccgtcaatacagggcttctccctattcaccactgacaagtacacctcgctggtcggaggtacagtcgatgcaaacaaggacacaggctatatatatctataaatacacatattataaatatacgcacatgaacacacaaatcctgcctgttcctgtactatacctctccttgcatacctatagattagtacatacctgtaaataaagacaaagaaaaattatatatatatatataaaatcagatatatataaaagtacaaatgcatcttttcagggatagctctagtatatttatagtacttatttgaagaggggcatcaacttgcagtctgggctttacctcttaagtacaagaggtgaactaatggaaccaacaagacaaaggtagcattgctgtgaccttcagcctaccttggacttgctgtgatcctgcctagtaaggtagatggtttagggaaatagcttgcagggaggagggcttagtggagaaggtctgtaggggccctgagttgagccttccaaaacattcctacaagccaaacagagagactatctgcccacctccaccagagtaccctgaccaagaaactcagggtacttaggacagaaagaggtaaaaacccaggctgggtggcttggtttggggaagtggggaggtaaccagggttgggttgttttgttttgttcttatattgtcccagcatgcaagtagaaaatatgactacaaaccaaattagtgctttttctaggacagcaagactatataaactgaacctgtatttttccagcgcatgtcccattatcatcaaaagaagaggggtaagtttagctgtgattgtcatgtagatatattttgatgctaagggctgccaagagagcctagatgtgcaataagaagtcatccagtaaaggtgcttagtgggccttgccacctaatgggatgtaagggcatagttctttaaaacgttttccagtgtagtcataaagggctttagtgtctgaagaaatcattattcccaatagcactaacttaactctgatcagcactgcttgggttgaggcaacttagcgatgcttggaaaggcatttgcacactcagtgcaccccaggaaggtttctgagtgccaggtcgagtggtaccaggaccaggctttggttaaagttcttgtaacatctatgtctcttcttccatcaagaccttatctgggattctgtctaagttttagagtacacggtatttgacagcttccttatactggtttcaagctattcactccaacaatttgatttcttgattttgctcaacattacattgaatgcatgaaattaaaatattccacgcccccaagttctgtatgacaccttgtgtgttttctcagatctatgtcagtcgaaaataaagccagcaagggggaaaaaataggcaaactgaatcaatggaaaactatgtagagcacttttcttttctccaagtcatgctttccttaaaatcagttgaaaaattgaatcaaggatggttcattattctgtacccatcctacgtctaagttggtacatatggcatatgggaaatttcaccatatgtgttcctatctccaatctattctgtcattgacgcctgctatgattttgttgtgagcacatacctcttaacataagaggacaggatgcagaactcacagcagaataagaggaaaggtaacctgacagccccagatcaagctcagtattccttccagaaaacctcagctcaccccacagagcatggcaataacaggaaatgcccatcattcctcttcacccagaagtaaaaagcacttcaaacccgaggccccctgggaaaacaagaaatcaagatggctgccagtcggaggctggctttcaagtctctccaactcggcagattggggtcttcagatgtgggacaatgccttccaagacattgaaacaccatccaatagaggcgctgagtggaacctgccacctaatgggaatgaatctcattcatcaaggtcaggactttgtactggggcaagaatttgtcctgcttccttagagagtgaaagaatgaggaagtgaactttacgtttaaaaactccagttgttttccctgtgtatttcttgaagggcaaccaagttggttattgtgtgaattttatattattgactggtgcgttgtttgaaataaggtttaaataggtgactgactcaactgcaaacagaccatgtaaaacagaagttgaaggagacctgatgccgccctcttcttattcctgatcctccctctgcctcctcactccctcccatttattcccagcttacagtgaaggctgatcaaagcagctatggtgccctttgcttgtctcggagctccacttcacaggaagtgttgtggtctttcatgtgaagttgcatttgagaagacaaaatttccaagccccgttcccacatcagtcatgtgcactgagcctgacctacaacagcactgctccctcactggatgggacacaagtgattccacagcctgcccttgctttcccttcatttctgtgtctgtaagtggttatgtgttgagccagggtaaattcagagagatgtgtacagagttcaacaatgggtctttaaaccattcaaatcattggcataattataagaactttccacaccgtggtttccaaaacaggtcatctctaactcgtttcctgcatgcctgtgtatatacatatataaatatatacatatatatatatatacatatatatatatatatatatatctttataccagatctatatgtacacatataatatgacttacatcatcaccctctgaccctatcacattcaggattctaaagcagggagcatcaagtttgccaaagtcaaggaaaaggaaagtcatgcacacaaaccaaagggaacatttcttcctgatttcataaggttgtttgttccatgcacatatatttacaaatatacacatatgtacccatattttcccaccctaagaatatcaatttatagccttaaggaaatcggtcagccatatccctaatgctgatatagaggcaaagaatacacaacagaaaatacaaagcaaaaatttagactgcagatactctctttgcttctctggagcagggtataaaagatatcaacaattcaagagccaacattgtactaatcaatctaaaataaatgagttgcacgcaaatgatttcatttattcacagcaaaccgagcaggtcttgcttgctgtcaccgcctaccctcccccatacttccaaggcagcagagcagcttggctcaaactgacaattcccaaatagaaactcctaaattgcatctgagaatgcccatgccaactccagctgccctctgcacctgaccagatcctgatgaactgaagctgaagatcagatggtgtttatgcagcttcccaggacctaaactgagtcaggcagtgacagagcaatgatatatgcagggactaagggatagggttgtttataccctcggcagatgcagcagaatgtcctaaagccttgcccagaagattataaaaagaggcggagactgttttatattcaggaaaaatgctttgtaaggcttctaacaggtgtcacctgacaagggccatcataatttattttatagggaagacatgaatcaggtggtttggagccctttcagcaaaacgcagctgcctcgctgattagacatttgacaatgttaatgtacatccattcctgggcagggagagagttggcaaactccccaccactgcacatagcttttaaaggcctctggaacagtgagagaagagatgagctacaaagggagcccacccccagaccactttaacaaaaagttgaccaaagaaaagacacctggtagagtggctggccagatagagctgaagaagatggaagttgcattaaatgctctgcagaaattactgcgttggactatctaacatgggtctgatggcaggcatttcagaacatggcagtgtgctttcctccccacatctaccaaacacacacccacacccccacacacacgcgagattatgtggatgctatgcctccttgcacctggacagattgtttttctggtaagtaggtggccctattataggtggcagctgtgttccagaagaaacaaagtgaagctgttctcagggtgatttctggagaaaactactgtctcctgaaagcatgcatagaagtcagtgctcactcttgctaagccacatattccttaacgatccggcttaatatttttaaaagatacctcctcaacccctatacctgtctcaacaatactgtcttcaattattaggtaaggccttgtcattaagagaggggtaggagaaaaaatagaataataaggaaagggaagaaaggagatattaatttcctaggattccaagaaaacaagtgtcacgtggaaatatatccctatgtagtttaaaacagtaacaaatatcaggctatgtttagccaattacaagagcccatatacagttttagatttttttaaaaaataatctcaggaagaccttgggtaagaaaagtaaccctgccctattccaccttctatttactgttagctccctgactctgcctctgcctctgtctttgcgtttcatttttaatctcagagcttcatattttttaaatatatagcaaacaagaaaagcaataagggaactactcacagccagctcaactctattacttatgattacaccatggcaatattcctttttcaccaggagctttggacctgcgcaggttgtggcatgtaatcacccggagcatgtagtcgtctgtagaaatcacaggcacactcatgtttgctctggaaggaatctgttttccacaatgactccccccagctaatgtacacactggcattttgcatgccttcctcacacatggggcaccagccttgctcagaaccacccaaactccacagaggcccttaatatggctagggacagatttcttaagaaagagtaagaagcagctacaaaggacaagcaaatccacaagtcaggcagcattcgagaggcaaaaatgaccctgcaattacgacaggctaggcaactgttttcaaattagcgtacgaacagtgagggactgtgtagagcaccatattatctaagccaaagcacttctaccagatcattcattgacagactggaaaacctaataaaatctttaaaaacagacaaatatctaagtctgaaagaatgccatggagtttgcctaggcttccaccaaagatttaattccattaagagggtttgtctagcctatcacgctaatccaaaggacagtcctcttacgggggagatcccagcatagatgctggtgtgacccagctcaatgattaacaaccatcagcatcaagaaaagcctccctccaagttaacccaaacccatccacttaatgacttaactttttttttttttttttttttttttggcaaaaagtaactgcatctgggcactcttcactctttgccccatagttggaagttaccgctatgtgactctttacctattttcaattaaaattatctttagatttttatttgagtctttaaccctcttaataatttttatagttcctctctactaagcctttttaagttctttatattgttcttaaatgatggaaccttatgactaatgataatcactgtctgaacagtgttgaactatactgggtgcagcatgaccatgaagctctggtgaagtcaaggtcacaaactgcttttaaggtcattaggtcataatctcagactcacaaagaactcaaaattggggagacaccactttagattactccaaaactctgggcctgtacttacccactaatttatcaagaggaatcaatatttttattttaaatatgaaactgggataaatgattggatctccacttattaaccagtactgcagtgtgtttatatccttttgtgtggtaggttggataggatttgtaaagctactgattgatctcatgggccagggttcaccaaaaggatgggaatttgtttctgcattcttacatattgggttgcatattccttcataatggatccataagtaactaaggccttggagactaacagttctccaaaatactcagctaaccaaaagaaaatactaatttttaaaatcatgtcataaaaaacagaaaagtaaaaaaagtctgaaatcctgaataaaattattttaaggatgaaattacatgcataaattaagggtagataacttcttgccatttaattaaacaaatccccaattcttatcagaataaaactgaaggacaatggatgccttttgggttttttaattttttaatattgcactttatagtacttcataagagacaactgtcttaattaaagccataaaataccaataatacatatattcagggcttctgaatatagtcaatcaataagcagtccatgagtcattcctgttttgtattgtttattgtaaattggagtttatctgttctattttttattaactacaattattgttctaggcaatcctaatctacttatacattttagatgtgtgctttaataaaactgtttgaaaatcaaagaaattattcatttcacaaaagcagtcttcgttttcaaaatagcttattacagtttctttagcaagttctaatactacatggaaattattttaaaattgtagatttttttcaggaatccattttgttatataaagcaaagttcacccatatggaaaatgaaatagataattagcaaacatatacctgggaaatgtaggatgtgtttgagcttttatataaatataggatgggtctaagaagttcccttataaaaatgggaaatagaggtatacaatttatcaataattccttatgcctaaattactaaccttccttgggaggacatgtaaagcagcagatttcataatgctttggtggttattttcctcctctccgctaaaatacacaatttctaacctagtatggtacactgtttacacacacatatataaagatgtccccacaactaaaaactttaatgtttcaacttcatcacaaatttttatataattttttttttaacagacagggtcttgctctgtcacccaggctagagtgcagtggtgcaatcatagctcagtgtagcctcaaacacctggactcaagcgatcctcccacttcagcctcttgagtagctgggacctcaggcacatgccaccatgcctggctaattttgttgttgttgttaagagatggagtctcactatgttacccaggctggtctcaaactcctgggctcaagagatcctcctgctttggcctcccaaagtgctgggattaaaggaatgagccaccatacccagcccttttatgtaatttgagtaaaagtaattactaaaaagcacttaatagtctagaaatccaccagaactgggtacctaaattgtccatatagagtaaacatgggtactaaactggacaaccccatcaattttatgcttaagtggccaaattgccctaaagaaagggtatctgaaccaagggccagtgatattcctctgttagaggctgttttgtggtctgaagagtttctctaaagggctgagactctattcggaagagggagcctcagttactgaattgcgctattgaaccctgaacacaaagtacacatatataccctgcatctagccttgatatttcttctgctcaagtcaaaaaactccggaagcaacagcttccaccatcaagcaatccacatacttaaaaagccatcaaagctaagaatagcaaaagctaccttcctgattcagtgaagttgctgctagcactaaaagcaagagaaattatacttttgttcttcagatacggttaaaacaaagaaaatgttgtcaacgttgacgccaacatagacatttgctctataacatataaactgtcttttagacaggttatgttaaaaatatcagaatgccatttttgtaaaggatcttttttaggatagacgtggtctcatgcttcctttgttcgcctccgttttaaaggagcattgtaacccctatcctcatccctacaaaaatccagtggatgcacttccaaattacttctgtcattttgtatgtgttgtgtttattatgcgtaattttcactggatgatgagatacatggtgatactatgtcagtttattctctgtgaatatgtctgtacatagacaggaagctctacttatttgtacataggctgtctgaagtatgtacttctgtcacatggacttcattctgataaagggtgtttcttcttgtttcactgtccatacctttgtgcttctactactgataatcaattcatagaatatcactttatgtaactaagtctcctcagtgtgaaaaataatagtaataaaattattgactcaaagaagta

SEQ ID NO: 555 - DNA, 11119 bp, Homo sapiens
atcccgttgctgctctgcaggctcacaggtggctctgccgtggatgtgggcgccccaggccccgctaggagttagccaactctctgtgctccggggcgtggatttggagcccccgcctctcctacccttgcttttggcttgggatggggggcgtggggcagggcctgccgtcgggggagacgcgcagaggggcgcttccattccccagccacctacaaacgactcagggggatgcgggccaagcgcctcaccaaatgcaacccagctccaagctcacagcataaatgatgaaagtttcctgtgaagcataacaatccctgattgtgaaagtaccccacaagcatcgttaactataaagtaaggaaaagtatgaaagaaccatctggttgagtctaaagttggaagatcaccatatccaccagaagacccaggatggatctgcaacaaagcaccaccatcacttccctagagaaatggtgtttggatgagtcactgtctggctgcagaagacattatagtgtcaagaaaaaactgaagttaattcgagtcttaggccttttcatgggtctggtagccattagcactgtctcattttcaatcagtgccttttctgagacagatacacagagcacaggagaggccagtgttgtaagtggccctagggtagcacagggttaccatcagagaactctcttagatttaaatgacaagattctggattatactccacagccacctctttctaaggaaggcgagtctgagaatagtacagatcacgcccaaggagactacccgaaagacatcttttcccttgaggagagaagaaaaggtgcgatcattctgcatgtcattggaatgatctacatgttcatagccttagccattgtctgtgatgagttctttgttccttctttgactgtcatcactgaaaaactgggcatctctgatgatgtggctggagccaccttcatggctgcaggagggtcagccccagaacttttcacatctctcataggggtatttatcgctcacagcaacgttggcataggcacaattgtaggttcagcagtattcaacatcctctttgttattggcatgtgtgctctgttttctagagaaatcttaaacctgacatggtggccgctctttcgagatgtgtctttctacattgttgacttgatcatgctgatcatatttttcctggataatgtcatcatgtggtgggaaagcttgcttctcttaacagcttatttttgctatgtggttttcatgaaattcaacgtccaagtagaaaaatgggtgaagcaaatgataaaccgcaataaggtcgtcaaggtgacagcaccagaagcccaagcaaagccatctgcagccagggacaaggatgaaccaactctaccggctaagccgcgtctccagcgaggtggaagctctgcctccctccacaacagtctcatgaggaatagcatcttccaactcatgatacacacccttgacccactcgccgaagaacttggatcatatggaaaactaaaatattatgacacaatgactgaagaagggaggttcagagaaaaggcttcaattctccacaagatcgccaagaagaaatgtcatgtggatgagaacgagaggcagaatggggctgccaaccacgtggaaaaaattgagcttccaaacagcaccagcacagatgttgaaatgacaccatccagtgatgcttcagaacctgtacaaaatggaaatctctcccacaacattgaaggtgcagaagcccagaccgctgatgaggaggaggaccagcctctcagccttgcctggccttctgaaacccgcaagcaagtcacgtttctgattgttttccccatagtgtttcctctctggattacgttacctgacgttcgcaaaccttcatcgaggaagttttttcccatcacgttctttggctccattacctggattgcagtattctcttacttgatggtctggtgggcgcaccaggttggagagacaattggcatcagtgaagagattatgggcctgaccatcttggctgctgggacctccatccctgatcttatcaccagtgtcatagtggcccggaaggggttaggggacatggctgtgtccagctctgttggaagcaacatttttgacatcactgtagggctcccactgccctggctcctgtacaccgtcattcacagattccagccagtggctgtcagcagcaatggccttttctgtgccatcgtccttctcttcatcatgctgctcttcgtcatcctctctatcgccctctgcaagtggcgaatgaacaaaatcctgggcttcatcatgtttggcctctactttgtgttcctggtggtgagcgttctcctagaagacagaattcttacatgccccgtctccatctagcaggaaaagccatatcttgcaccagcagcatgaatggtccctccacactctgggctctgggctccttgacctcttgagaagaggcagctggcacacagccctgggtgccaagtgtccctccttggtgaatttgaggagagatggattcacactgggcccattcacttcacaggctgcttccaccctgcctactgaaatgacttcatgtaaaagacaaagagaaccgtcaatacagggcttctccctattcaccactgacaagtacacctcgctggtcggaggtacagtcgatgcaaacaaggacacaggctatatatatctataaatacacatattataaatatacgcacatgaacacacaaatcctgcctgttcctgtactatacctctccttgcatacctatagattagtacatacctgtaaataaagacaaagaaaaattatatatatatatataaaatcagatatatataaaagtacaaatgcatcttttcagggatagctctagtatatttatagtacttatttgaagaggggcatcaacttgcagtctgggctttacctcttaagtacaagaggtgaactaatggaaccaacaagacaaaggtagcattgctgtgaccttcagcctaccttggacttgctgtgatcctgcctagtaaggtagatggtttagggaaatagcttgcagggaggagggcttagtggagaaggtctgtaggggccctgagttgagccttccaaaacattcctacaagccaaacagagagactatctgcccacctccaccagagtaccctgaccaagaaactcagggtacttaggacagaaagaggtaaaaacccaggctgggtggcttggtttggggaagtggggaggtaaccagggttgggttgttttgttttgttcttatattgtcccagcatgcaagtagaaaatatgactacaaaccaaattagtgctttttctaggacagcaagactatataaactgaacctgtatttttccagcgcatgtcccattatcatcaaaagaagaggggtaagtttagctgtgattgtcatgtagatatattttgatgctaagggctgccaagagagcctagatgtgcaataagaagtcatccagtaaaggtgcttagtgggccttgccacctaatgggatgtaagggcatagttctttaaaacgttttccagtgtagtcataaagggctttagtgtctgaagaaatcattattcccaatagcactaacttaactctgatcagcactgcttgggttgaggcaacttagcgatgcttggaaaggcatttgcacactcagtgcaccccaggaaggtttctgagtgccaggtcgagtggtaccaggaccaggctttggttaaagttcttgtaacatctatgtctcttcttccatcaagaccttatctgggattctgtctaagttttagagtacacggtatttgacagcttccttatactggtttcaagctattcactccaacaatttgatttcttgattttgctcaacattacattgaatgcatgaaattaaaatattccacgcccccaagttctgtatgacaccttgtgtgttttctcagatctatgtcagtcgaaaataaagccagcaagggggaaaaaataggcaaactgaatcaatggaaaactatgtagagcacttttcttttctccaagtcatgctttccttaaaatcagttgaaaaattgaatcaaggatggttcattattctgtacccatcctacgtctaagttggtacatatggcatatgggaaatttcaccatatgtgttcctatctccaatctattctgtcattgacgcctgctatgattttgttgtgagcacatacctcttaacataagaggacaggatgcagaactcacagcagaataagaggaaaggtaacctgacagccccagatcaagctcagtattccttccagaaaacctcagctcaccccacagagcatggcaataacaggaaatgcccatcattcctcttcacccagaagtaaaaagcacttcaaacccgaggccccctgggaaaacaagaaatcaagatggctgccagtcggaggctggctttcaagtctctccaactcggcagattggggtcttcagatgtgggacaatgccttccaagacattgaaacaccatccaatagaggcgctgagtggaacctgccacctaatgggaatgaatctcattcatcaaggtcaggactttgtactggggcaagaatttgtcctgcttccttagagagtgaaagaatgaggaagtgaactttacgtttaaaaactccagttgttttccctgtgtatttcttgaagggcaaccaagttggttattgtgtgaattttatattattgactggtgcgttgtttgaaataaggtttaaataggtgactgactcaactgcaaacagaccatgtaaaacagaagttgaaggagacctgatgccgccctcttcttattcctgatcctccctctgcctcctcactccctcccatttattcccagcttacagtgaaggctgatcaaagcagctatggtgccctttgcttgtctcggagctccacttcacaggaagtgttgtggtctttcatgtgaagttgcatttgagaagacaaaatttccaagccccgttcccacatcagtcatgtgcactgagcctgacctacaacagcactgctccctcactggatgggacacaagtgattccacagcctgcccttgctttcccttcatttctgtgtctgtaagtggttatgtgttgagccagggtaaattcagagagatgtgtacagagttcaacaatgggtctttaaaccattcaaatcattggcataattataagaactttccacaccgtggtttccaaaacaggtcatctctaactcgtttcctgcatgcctgtgtatatacatatataaatatatacatatatatatatatacatatatatatatatatatatatctttataccagatctatatgtacacatataatatgacttacatcatcaccctctgaccctatcacattcaggattctaaagcagggagcatcaagtttgccaaagtcaaggaaaaggaaagtcatgcacacaaaccaaagggaacatttcttcctgatttcataaggttgtttgttccatgcacatatatttacaaatatacacatatgtacccatattttcccaccctaagaatatcaatttatagccttaaggaaatcggtcagccatatccctaatgctgatatagaggcaaagaatacacaacagaaaatacaaagcaaaaatttagactgcagatactctctttgcttctctggagcagggtataaaagatatcaacaattcaagagccaacattgtactaatcaatctaaaataaatgagttgcacgcaaatgatttcatttattcacagcaaaccgagcaggtcttgcttgctgtcaccgcctaccctcccccatacttccaaggcagcagagcagcttggctcaaactgacaattcccaaatagaaactcctaaattgcatctgagaatgcccatgccaactccagctgccctctgcacctgaccagatcctgatgaactgaagctgaagatcagatggtgtttatgcagcttcccaggacctaaactgagtcaggcagtgacagagcaatgatatatgcagggactaagggatagggttgtttataccctcggcagatgcagcagaatgtcctaaagccttgcccagaagattataaaaagaggcggagactgttttatattcaggaaaaatgctttgtaaggcttctaacaggtgtcacctgacaagggccatcataatttattttatagggaagacatgaatcaggtggtttggagccctttcagcaaaacgcagctgcctcgctgattagacatttgacaatgttaatgtacatccattcctgggcagggagagagttggcaaactccccaccactgcacatagcttttaaaggcctctggaacagtgagagaagagatgagctacaaagggagcccacccccagaccactttaacaaaaagttgaccaaagaaaagacacctggtagagtggctggccagatagagctgaagaagatggaagttgcattaaatgctctgcagaaattactgcgttggactatctaacatgggtctgatggcaggcatttcagaacatggcagtgtgctttcctccccacatctaccaaacacacacccacacccccacacacacgcgagattatgtggatgctatgcctccttgcacctggacagattgtttttctggtaagtaggtggccctattataggtggcagctgtgttccagaagaaacaaagtgaagctgttctcagggtgatttctggagaaaactactgtctcctgaaagcatgcatagaagtcagtgctcactcttgctaagccacatattccttaacgatccggcttaatatttttaaaagatacctcctcaacccctatacctgtctcaacaatactgtcttcaattattaggtaaggccttgtcattaagagaggggtaggagaaaaaatagaataataaggaaagggaagaaaggagatattaatttcctaggattccaagaaaacaagtgtcacgtggaaatatatccctatgtagtttaaaacagtaacaaatatcaggctatgtttagccaattacaagagcccatatacagttttagatttttttaaaaaataatctcaggaagaccttgggtaagaaaagtaaccctgccctattccaccttctatttactgttagctccctgactctgcctctgcctctgtctttgcgtttcatttttaatctcagagcttcatattttttaaatatatagcaaacaagaaaagcaataagggaactactcacagccagctcaactctattacttatgattacaccatggcaatattcctttttcaccaggagctttggacctgcgcaggttgtggcatgtaatcacccggagcatgtagtcgtctgtagaaatcacaggcacactcatgtttgctctggaaggaatctgttttccacaatgactccccccagctaatgtacacactggcattttgcatgccttcctcacacatggggcaccagccttgctcagaaccacccaaactccacagaggcccttaatatggctagggacagatttcttaagaaagagtaagaagcagctacaaaggacaagcaaatccacaagtcaggcagcattcgagaggcaaaaatgaccctgcaattacgacaggctaggcaactgttttcaaattagcgtacgaacagtgagggactgtgtagagcaccatattatctaagccaaagcacttctaccagatcattcattgacagactggaaaacctaataaaatctttaaaaacagacaaatatctaagtctgaaagaatgccatggagtttgcctaggcttccaccaaagatttaattccattaagagggtttgtctagcctatcacgctaatccaaaggacagtcctcttacgggggagatcccagcatagatgctggtgtgacccagctcaatgattaacaaccatcagcatcaagaaaagcctccctccaagttaacccaaacccatccacttaatgacttaactttttttttttttttttttttttttggcaaaaagtaactgcatctgggcactcttcactctttgccccatagttggaagttaccgctatgtgactctttacctattttcaattaaaattatctttagatttttatttgagtctttaaccctcttaataatttttatagttcctctctactaagcctttttaagttctttatattgttcttaaatgatggaaccttatgactaatgataatcactgtctgaacagtgttgaactatactgggtgcagcatgaccatgaagctctggtgaagtcaaggtcacaaactgcttttaaggtcattaggtcataatctcagactcacaaagaactcaaaattggggagacaccactttagattactccaaaactctgggcctgtacttacccactaatttatcaagaggaatcaatatttttattttaaatatgaaactgggataaatgattggatctccacttattaaccagtactgcagtgtgtttatatccttttgtgtggtaggttggataggatttgtaaagctactgattgatctcatgggccagggttcaccaaaaggatgggaatttgtttctgcattcttacatattgggttgcatattccttcataatggatccataagtaactaaggccttggagactaacagttctccaaaatactcagctaaccaaaagaaaatactaatttttaaaatcatgtcataaaaaacagaaaagtaaaaaaagtctgaaatcctgaataaaattattttaaggatgaaattacatgcataaattaagggtagataacttcttgccatttaattaaacaaatccccaattcttatcagaataaaactgaaggacaatggatgccttttgggttttttaattttttaatattgcactttatagtacttcataagagacaactgtcttaattaaagccataaaataccaataatacatatattcagggcttctgaatatagtcaatcaataagcagtccatgagtcattcctgttttgtattgtttattgtaaattggagtttatctgttctattttttattaactacaattattgttctaggcaatcctaatctacttatacattttagatgtgtgctttaataaaactgtttgaaaatcaaagaaattattcatttcacaaaagcagtcttcgttttcaaaatagcttattacagtttctttagcaagttctaatactacatggaaattattttaaaattgtagatttttttcaggaatccattttgttatataaagcaaagttcacccatatggaaaatgaaatagataattagcaaacatatacctgggaaatgtaggatgtgtttgagcttttatataaatataggatgggtctaagaagttcccttataaaaatgggaaatagaggtatacaatttatcaataattccttatgcctaaattactaaccttccttgggaggacatgtaaagcagcagatttcataatgctttggtggttattttcctcctctccgctaaaatacacaatttctaacctagtatggtacactgtttacacacacatatataaagatgtccccacaactaaaaactttaatgtttcaacttcatcacaaatttttatataattttttttttaacagacagggtcttgctctgtcacccaggctagagtgcagtggtgcaatcatagctcagtgtagcctcaaacacctggactcaagcgatcctcccacttcagcctcttgagtagctgggacctcaggcacatgccaccatgcctggctaattttgttgttgttgttaagagatggagtctcactatgttacccaggctggtctcaaactcctgggctcaagagatcctcctgctttggcctcccaaagtgctgggattaaaggaatgagccaccatacccagcccttttatgtaatttgagtaaaagtaattactaaaaagcacttaatagtctagaaatccaccagaactgggtacctaaattgtccatatagagtaaacatgggtactaaactggacaaccccatcaattttatgcttaagtggccaaattgccctaaagaaagggtatctgaaccaagggccagtgatattcctctgttagaggctgttttgtggtctgaagagtttctctaaagggctgagactctattcggaagagggagcctcagttactgaattgcgctattgaaccctgaacacaaagtacacatatataccctgcatctagccttgatatttcttctgctcaagtcaaaaaactccggaagcaacagcttccaccatcaagcaatccacatacttaaaaagccatcaaagctaagaatagcaaaagctaccttcctgattcagtgaagttgctgctagcactaaaagcaagagaaattatacttttgttcttcagatacggttaaaacaaagaaaatgttgtcaacgttgacgccaacatagacatttgctctataacatataaactgtcttttagacaggttatgttaaaaatatcagaatgccatttttgtaaaggatcttttttaggatagacgtggtctcatgcttcctttgttcgcctccgttttaaaggagcattgtaacccctatcctcatccctacaaaaatccagtggatgcacttccaaattacttctgtcattttgtatgtgttgtgtttattatgcgtaattttcactggatgatgagatacatggtgatactatgtcagtttattctctgtgaatatgtctgtacatagacaggaagctctacttatttgtacataggctgtctgaagtatgtacttctgtcacatggacttcattctgataaagggtgtttcttcttgtttcactgtccatacctttgtgcttctactactgataatcaattcatagaatatcactttatgtaactaagtctcctcagtgtgaaaaataatagtaataaaattattgactcaaagaagta

SEQ ID NO: 556 - DNA, 11590 bp, Homo sapiens
gtaaatcttgtagtcaaatcaattgctgcagctgagcaaagagagccgcggtccctccttccctgggagaagcggatgttatcccagcaccttctgcaagctggtcagggaccgagtcccggaaacttgggtctagcatgtgtctctgagcctagatttggtttccagttgtgtagcacttggctgaagaccaacaaaggggccgagccaactatagaaagtcatctctttaagcagttttcaagattgaacctataccatttttataataagaaaaaaaaatgtactccccagacaacaatggatgtgaagcaattgccagtcttcagcctgtgagacaaagggggactaagagcatgtttacttgcttggaaggtgctcagctgctgttttatgaccagcttccctggaaaagcctgaccaacagagtggtcataggcccagctgaacaccggtcaacaaaaatgtcctgcccatgtctggtgttaggccaatggaaggaaacctccaaagaggctggtgtgaacaggacaagactgaagaaaagaagagacaggaggccactttagtagtccaggtgacagctacagtaatggagatgggccaaccaggttggtgccagctatatttatgtcttctcagagtcataacattccagacttagaaggacagagacgtttagttggatacatgacagaaagtctatagcataaaaaatagacgcatttctaggctatagcctacacgttgcataaatgatgaaagtttcctgtgaagcataacaatccctgattgtgaaagtaccccacaagcatcgttaactataaagtaaggaaaagtatgaaagaaccatctggttgagtctaaagttggaagatcaccatatccaccagaagacccaggatggatctgcaacaaagcaccaccatcacttccctagagaaatggtgtttggatgagtcactgtctggctgcagaagacattatagtgtcaagaaaaaactgaagttaattcgagtcttaggccttttcatgggtctggtagccattagcactgtctcattttcaatcagtgccttttctgagacagatacacagagcacaggagaggccagtgttgtaagtggccctagggtagcacagggttaccatcagagaactctcttagatttaaatgacaagattctggattatactccacagccacctctttctaaggaaggcgagtctgagaatagtacagatcacgcccaaggagactacccgaaagacatcttttcccttgaggagagaagaaaaggtgcgatcattctgcatgtcattggaatgatctacatgttcatagccttagccattgtctgtgatgagttctttgttccttctttgactgtcatcactgaaaaactgggcatctctgatgatgtggctggagccaccttcatggctgcaggagggtcagccccagaacttttcacatctctcataggggtatttatcgctcacagcaacgttggcataggcacaattgtaggttcagcagtattcaacatcctctttgttattggcatgtgtgctctgttttctagagaaatcttaaacctgacatggtggccgctctttcgagatgtgtctttctacattgttgacttgatcatgctgatcatatttttcctggataatgtcatcatgtggtgggaaagcttgcttctcttaacagcttatttttgctatgtggttttcatgaaattcaacgtccaagtagaaaaatgggtgaagcaaatgataaaccgcaataaggtcgtcaaggtgacagcaccagaagcccaagcaaagccatctgcagccagggacaaggatgaaccaactctaccggctaagccgcgtctccagcgaggtggaagctctgcctccctccacaacagtctcatgaggaatagcatcttccaactcatgatacacacccttgacccactcgccgaagaacttggatcatatggaaaactaaaatattatgacacaatgactgaagaagggaggttcagagaaaaggcttcaattctccacaagatcgccaagaagaaatgtcatgtggatgagaacgagaggcagaatggggctgccaaccacgtggaaaaaattgagcttccaaacagcaccagcacagatgttgaaatgacaccatccagtgatgcttcagaacctgtacaaaatggaaatctctcccacaacattgaaggtgcagaagcccagaccgctgatgaggaggaggaccagcctctcagccttgcctggccttctgaaacccgcaagcaagtcacgtttctgattgttttccccatagtgtttcctctctggattacgttacctgacgttcgcaaaccttcatcgaggaagttttttcccatcacgttctttggctccattacctggattgcagtattctcttacttgatggtctggtgggcgcaccaggttggagagacaattggcatcagtgaagagattatgggcctgaccatcttggctgctgggacctccatccctgatcttatcaccagtgtcatagtggcccggaaggggttaggggacatggctgtgtccagctctgttggaagcaacatttttgacatcactgtagggctcccactgccctggctcctgtacaccgtcattcacagattccagccagtggctgtcagcagcaatggccttttctgtgccatcgtccttctcttcatcatgctgctcttcgtcatcctctctatcgccctctgcaagtggcgaatgaacaaaatcctgggcttcatcatgtttggcctctactttgtgttcctggtggtgagcgttctcctagaagacagaattcttacatgccccgtctccatctagcaggaaaagccatatcttgcaccagcagcatgaatggtccctccacactctgggctctgggctccttgacctcttgagaagaggcagctggcacacagccctgggtgccaagtgtccctccttggtgaatttgaggagagatggattcacactgggcccattcacttcacaggctgcttccaccctgcctactgaaatgacttcatgtaaaagacaaagagaaccgtcaatacagggcttctccctattcaccactgacaagtacacctcgctggtcggaggtacagtcgatgcaaacaaggacacaggctatatatatctataaatacacatattataaatatacgcacatgaacacacaaatcctgcctgttcctgtactatacctctccttgcatacctatagattagtacatacctgtaaataaagacaaagaaaaattatatatatatatataaaatcagatatatataaaagtacaaatgcatcttttcagggatagctctagtatatttatagtacttatttgaagaggggcatcaacttgcagtctgggctttacctcttaagtacaagaggtgaactaatggaaccaacaagacaaaggtagcattgctgtgaccttcagcctaccttggacttgctgtgatcctgcctagtaaggtagatggtttagggaaatagcttgcagggaggagggcttagtggagaaggtctgtaggggccctgagttgagccttccaaaacattcctacaagccaaacagagagactatctgcccacctccaccagagtaccctgaccaagaaactcagggtacttaggacagaaagaggtaaaaacccaggctgggtggcttggtttggggaagtggggaggtaaccagggttgggttgttttgttttgttcttatattgtcccagcatgcaagtagaaaatatgactacaaaccaaattagtgctttttctaggacagcaagactatataaactgaacctgtatttttccagcgcatgtcccattatcatcaaaagaagaggggtaagtttagctgtgattgtcatgtagatatattttgatgctaagggctgccaagagagcctagatgtgcaataagaagtcatccagtaaaggtgcttagtgggccttgccacctaatgggatgtaagggcatagttctttaaaacgttttccagtgtagtcataaagggctttagtgtctgaagaaatcattattcccaatagcactaacttaactctgatcagcactgcttgggttgaggcaacttagcgatgcttggaaaggcatttgcacactcagtgcaccccaggaaggtttctgagtgccaggtcgagtggtaccaggaccaggctttggttaaagttcttgtaacatctatgtctcttcttccatcaagaccttatctgggattctgtctaagttttagagtacacggtatttgacagcttccttatactggtttcaagctattcactccaacaatttgatttcttgattttgctcaacattacattgaatgcatgaaattaaaatattccacgcccccaagttctgtatgacaccttgtgtgttttctcagatctatgtcagtcgaaaataaagccagcaagggggaaaaaataggcaaactgaatcaatggaaaactatgtagagcacttttcttttctccaagtcatgctttccttaaaatcagttgaaaaattgaatcaaggatggttcattattctgtacccatcctacgtctaagttggtacatatggcatatgggaaatttcaccatatgtgttcctatctccaatctattctgtcattgacgcctgctatgattttgttgtgagcacatacctcttaacataagaggacaggatgcagaactcacagcagaataagaggaaaggtaacctgacagccccagatcaagctcagtattccttccagaaaacctcagctcaccccacagagcatggcaataacaggaaatgcccatcattcctcttcacccagaagtaaaaagcacttcaaacccgaggccccctgggaaaacaagaaatcaagatggctgccagtcggaggctggctttcaagtctctccaactcggcagattggggtcttcagatgtgggacaatgccttccaagacattgaaacaccatccaatagaggcgctgagtggaacctgccacctaatgggaatgaatctcattcatcaaggtcaggactttgtactggggcaagaatttgtcctgcttccttagagagtgaaagaatgaggaagtgaactttacgtttaaaaactccagttgttttccctgtgtatttcttgaagggcaaccaagttggttattgtgtgaattttatattattgactggtgcgttgtttgaaataaggtttaaataggtgactgactcaactgcaaacagaccatgtaaaacagaagttgaaggagacctgatgccgccctcttcttattcctgatcctccctctgcctcctcactccctcccatttattcccagcttacagtgaaggctgatcaaagcagctatggtgccctttgcttgtctcggagctccacttcacaggaagtgttgtggtctttcatgtgaagttgcatttgagaagacaaaatttccaagccccgttcccacatcagtcatgtgcactgagcctgacctacaacagcactgctccctcactggatgggacacaagtgattccacagcctgcccttgctttcccttcatttctgtgtctgtaagtggttatgtgttgagccagggtaaattcagagagatgtgtacagagttcaacaatgggtctttaaaccattcaaatcattggcataattataagaactttccacaccgtggtttccaaaacaggtcatctctaactcgtttcctgcatgcctgtgtatatacatatataaatatatacatatatatatatatacatatatatatatatatatatatctttataccagatctatatgtacacatataatatgacttacatcatcaccctctgaccctatcacattcaggattctaaagcagggagcatcaagtttgccaaagtcaaggaaaaggaaagtcatgcacacaaaccaaagggaacatttcttcctgatttcataaggttgtttgttccatgcacatatatttacaaatatacacatatgtacccatattttcccaccctaagaatatcaatttatagccttaaggaaatcggtcagccatatccctaatgctgatatagaggcaaagaatacacaacagaaaatacaaagcaaaaatttagactgcagatactctctttgcttctctggagcagggtataaaagatatcaacaattcaagagccaacattgtactaatcaatctaaaataaatgagttgcacgcaaatgatttcatttattcacagcaaaccgagcaggtcttgcttgctgtcaccgcctaccctcccccatacttccaaggcagcagagcagcttggctcaaactgacaattcccaaatagaaactcctaaattgcatctgagaatgcccatgccaactccagctgccctctgcacctgaccagatcctgatgaactgaagctgaagatcagatggtgtttatgcagcttcccaggacctaaactgagtcaggcagtgacagagcaatgatatatgcagggactaagggatagggttgtttataccctcggcagatgcagcagaatgtcctaaagccttgcccagaagattataaaaagaggcggagactgttttatattcaggaaaaatgctttgtaaggcttctaacaggtgtcacctgacaagggccatcataatttattttatagggaagacatgaatcaggtggtttggagccctttcagcaaaacgcagctgcctcgctgattagacatttgacaatgttaatgtacatccattcctgggcagggagagagttggcaaactccccaccactgcacatagcttttaaaggcctctggaacagtgagagaagagatgagctacaaagggagcccacccccagaccactttaacaaaaagttgaccaaagaaaagacacctggtagagtggctggccagatagagctgaagaagatggaagttgcattaaatgctctgcagaaattactgcgttggactatctaacatgggtctgatggcaggcatttcagaacatggcagtgtgctttcctccccacatctaccaaacacacacccacacccccacacacacgcgagattatgtggatgctatgcctccttgcacctggacagattgtttttctggtaagtaggtggccctattataggtggcagctgtgttccagaagaaacaaagtgaagctgttctcagggtgatttctggagaaaactactgtctcctgaaagcatgcatagaagtcagtgctcactcttgctaagccacatattccttaacgatccggcttaatatttttaaaagatacctcctcaacccctatacctgtctcaacaatactgtcttcaattattaggtaaggccttgtcattaagagaggggtaggagaaaaaatagaataataaggaaagggaagaaaggagatattaatttcctaggattccaagaaaacaagtgtcacgtggaaatatatccctatgtagtttaaaacagtaacaaatatcaggctatgtttagccaattacaagagcccatatacagttttagatttttttaaaaaataatctcaggaagaccttgggtaagaaaagtaaccctgccctattccaccttctatttactgttagctccctgactctgcctctgcctctgtctttgcgtttcatttttaatctcagagcttcatattttttaaatatatagcaaacaagaaaagcaataagggaactactcacagccagctcaactctattacttatgattacaccatggcaatattcctttttcaccaggagctttggacctgcgcaggttgtggcatgtaatcacccggagcatgtagtcgtctgtagaaatcacaggcacactcatgtttgctctggaaggaatctgttttccacaatgactccccccagctaatgtacacactggcattttgcatgccttcctcacacatggggcaccagccttgctcagaaccacccaaactccacagaggcccttaatatggctagggacagatttcttaagaaagagtaagaagcagctacaaaggacaagcaaatccacaagtcaggcagcattcgagaggcaaaaatgaccctgcaattacgacaggctaggcaactgttttcaaattagcgtacgaacagtgagggactgtgtagagcaccatattatctaagccaaagcacttctaccagatcattcattgacagactggaaaacctaataaaatctttaaaaacagacaaatatctaagtctgaaagaatgccatggagtttgcctaggcttccaccaaagatttaattccattaagagggtttgtctagcctatcacgctaatccaaaggacagtcctcttacgggggagatcccagcatagatgctggtgtgacccagctcaatgattaacaaccatcagcatcaagaaaagcctccctccaagttaacccaaacccatccacttaatgacttaactttttttttttttttttttttttttggcaaaaagtaactgcatctgggcactcttcactctttgccccatagttggaagttaccgctatgtgactctttacctattttcaattaaaattatctttagatttttatttgagtctttaaccctcttaataatttttatagttcctctctactaagcctttttaagttctttatattgttcttaaatgatggaaccttatgactaatgataatcactgtctgaacagtgttgaactatactgggtgcagcatgaccatgaagctctggtgaagtcaaggtcacaaactgcttttaaggtcattaggtcataatctcagactcacaaagaactcaaaattggggagacaccactttagattactccaaaactctgggcctgtacttacccactaatttatcaagaggaatcaatatttttattttaaatatgaaactgggataaatgattggatctccacttattaaccagtactgcagtgtgtttatatccttttgtgtggtaggttggataggatttgtaaagctactgattgatctcatgggccagggttcaccaaaaggatgggaatttgtttctgcattcttacatattgggttgcatattccttcataatggatccataagtaactaaggccttggagactaacagttctccaaaatactcagctaaccaaaagaaaatactaatttttaaaatcatgtcataaaaaacagaaaagtaaaaaaagtctgaaatcctgaataaaattattttaaggatgaaattacatgcataaattaagggtagataacttcttgccatttaattaaacaaatccccaattcttatcagaataaaactgaaggacaatggatgccttttgggttttttaattttttaatattgcactttatagtacttcataagagacaactgtcttaattaaagccataaaataccaataatacatatattcagggcttctgaatatagtcaatcaataagcagtccatgagtcattcctgttttgtattgtttattgtaaattggagtttatctgttctattttttattaactacaattattgttctaggcaatcctaatctacttatacattttagatgtgtgctttaataaaactgtttgaaaatcaaagaaattattcatttcacaaaagcagtcttcgttttcaaaatagcttattacagtttctttagcaagttctaatactacatggaaattattttaaaattgtagatttttttcaggaatccattttgttatataaagcaaagttcacccatatggaaaatgaaatagataattagcaaacatatacctgggaaatgtaggatgtgtttgagcttttatataaatataggatgggtctaagaagttcccttataaaaatgggaaatagaggtatacaatttatcaataattccttatgcctaaattactaaccttccttgggaggacatgtaaagcagcagatttcataatgctttggtggttattttcctcctctccgctaaaatacacaatttctaacctagtatggtacactgtttacacacacatatataaagatgtccccacaactaaaaactttaatgtttcaacttcatcacaaatttttatataattttttttttaacagacagggtcttgctctgtcacccaggctagagtgcagtggtgcaatcatagctcagtgtagcctcaaacacctggactcaagcgatcctcccacttcagcctcttgagtagctgggacctcaggcacatgccaccatgcctggctaattttgttgttgttgttaagagatggagtctcactatgttacccaggctggtctcaaactcctgggctcaagagatcctcctgctttggcctcccaaagtgctgggattaaaggaatgagccaccatacccagcccttttatgtaatttgagtaaaagtaattactaaaaagcacttaatagtctagaaatccaccagaactgggtacctaaattgtccatatagagtaaacatgggtactaaactggacaaccccatcaattttatgcttaagtggccaaattgccctaaagaaagggtatctgaaccaagggccagtgatattcctctgttagaggctgttttgtggtctgaagagtttctctaaagggctgagactctattcggaagagggagcctcagttactgaattgcgctattgaaccctgaacacaaagtacacatatataccctgcatctagccttgatatttcttctgctcaagtcaaaaaactccggaagcaacagcttccaccatcaagcaatccacatacttaaaaagccatcaaagctaagaatagcaaaagctaccttcctgattcagtgaagttgctgctagcactaaaagcaagagaaattatacttttgttcttcagatacggttaaaacaaagaaaatgttgtcaacgttgacgccaacatagacatttgctctataacatataaactgtcttttagacaggttatgttaaaaatatcagaatgccatttttgtaaaggatcttttttaggatagacgtggtctcatgcttcctttgttcgcctccgttttaaaggagcattgtaacccctatcctcatccctacaaaaatccagtggatgcacttccaaattacttctgtcattttgtatgtgttgtgtttattatgcgtaattttcactggatgatgagatacatggtgatactatgtcagtttattctctgtgaatatgtctgtacatagacaggaagctctacttatttgtacataggctgtctgaagtatgtacttctgtcacatggacttcattctgataaagggtgtttcttcttgtttcactgtccatacctttgtgcttctactactgataatcaattcatagaatatcactttatgtaactaagtctcctcagtgtgaaaaataatagtaataaaattattgactcaaagaagta

SEQ ID NO: 557 - DNA, 11600 bp, Homo sapiens
attctatttcttgtggtcaaggggatcttgctttccagataggacaggaaggagcactgggctggacatcccgaggccaaaagccgaagcctgtcagtgattcaaaatgacacggggttttgggtctcactttcatcacccatgaaatgaaaggtcaccctgcaagactgaagcccctgcagtgtcccaagcatccaaatccaacactcaagaaaccctggaccccaacagcctgtcctgcaggcctccgtgccttttcattgaacgtcttttccaccattacacatcacatcgcctcctaaagaaaagcgcgactgctatcactttttgcagataattggagaggcggtgcccagcataagatgaccccaaagttgacagcactttcaggctttgtgaattaggcgcgtcaccgacctgtacgatttctcctctctgcccttgctcgcctgcaaatcctgacccccgtccacactgcggagaaatctcctaagagacggctgccagcgtcgcctctgcgcccaggaggcgtggagcaaaggactcgggagctgagcgcgctgcggccccgctcccagcgcacagcgcacagcccagagggaggggccggcgggggccgggcagcgccagactcggagcgccgggctcacagcggctcagtctcctcccgaacccagcccggctggcgagagcggcagccagtgcgagccagagcccgggcctcagagcgggtaggcggagggccggcggactggagcggcgggccgcgctcgggggccccgccgtgtgcgcgtcctcccatcttatcctgcataaatgatgaaagtttcctgtgaagcataacaatccctgattgtgaaagtaccccacaagcatcgttaactataaagtaaggaaaagtatgaaagaaccatctggttgagtctaaagttggaagatcaccatatccaccagaagacccaggatggatctgcaacaaagcaccaccatcacttccctagagaaatggtgtttggatgagtcactgtctggctgcagaagacattatagtgtcaagaaaaaactgaagttaattcgagtcttaggccttttcatgggtctggtagccattagcactgtctcattttcaatcagtgccttttctgagacagatacacagagcacaggagaggccagtgttgtaagtggccctagggtagcacagggttaccatcagagaactctcttagatttaaatgacaagattctggattatactccacagccacctctttctaaggaaggcgagtctgagaatagtacagatcacgcccaaggagactacccgaaagacatcttttcccttgaggagagaagaaaaggtgcgatcattctgcatgtcattggaatgatctacatgttcatagccttagccattgtctgtgatgagttctttgttccttctttgactgtcatcactgaaaaactgggcatctctgatgatgtggctggagccaccttcatggctgcaggagggtcagccccagaacttttcacatctctcataggggtatttatcgctcacagcaacgttggcataggcacaattgtaggttcagcagtattcaacatcctctttgttattggcatgtgtgctctgttttctagagaaatcttaaacctgacatggtggccgctctttcgagatgtgtctttctacattgttgacttgatcatgctgatcatatttttcctggataatgtcatcatgtggtgggaaagcttgcttctcttaacagcttatttttgctatgtggttttcatgaaattcaacgtccaagtagaaaaatgggtgaagcaaatgataaaccgcaataaggtcgtcaaggtgacagcaccagaagcccaagcaaagccatctgcagccagggacaaggatgaaccaactctaccggctaagccgcgtctccagcgaggtggaagctctgcctccctccacaacagtctcatgaggaatagcatcttccaactcatgatacacacccttgacccactcgccgaagggaggttcagagaaaaggcttcaattctccacaagatcgccaagaagaaatgtcatgtggatgagaacgagaggcagaatggggctgccaaccacgtggaaaaaattgagcttccaaacagcaccagcacagatgttgaaatgacaccatccagtgatgcttcagaacctgtacaaaatggaaatctctcccacaacattgaaggtgcagaagcccagaccgctgatgaggaggaggaccagcctctcagccttgcctggccttctgaaacccgcaagcaagtcacgtttctgattgttttccccatagtgtttcctctctggattacgttacctgacgttcgcaaaccttcatcgaggaagttttttcccatcacgttctttggctccattacctggattgcagtattctcttacttgatggtctggtgggcgcaccaggttggagagacaattggcatcagtgaagagattatgggcctgaccatcttggctgctgggacctccatccctgatcttatcaccagtgtcatagtggcccggaaggggttaggggacatggctgtgtccagctctgttggaagcaacatttttgacatcactgtagggctcccactgccctggctcctgtacaccgtcattcacagattccagccagtggctgtcagcagcaatggccttttctgtgccatcgtccttctcttcatcatgctgctcttcgtcatcctctctatcgccctctgcaagtggcgaatgaacaaaatcctgggcttcatcatgtttggcctctactttgtgttcctggtggtgagcgttctcctagaagacagaattcttacatgccccgtctccatctagcaggaaaagccatatcttgcaccagcagcatgaatggtccctccacactctgggctctgggctccttgacctcttgagaagaggcagctggcacacagccctgggtgccaagtgtccctccttggtgaatttgaggagagatggattcacactgggcccattcacttcacaggctgcttccaccctgcctactgaaatgacttcatgtaaaagacaaagagaaccgtcaatacagggcttctccctattcaccactgacaagtacacctcgctggtcggaggtacagtcgatgcaaacaaggacacaggctatatatatctataaatacacatattataaatatacgcacatgaacacacaaatcctgcctgttcctgtactatacctctccttgcatacctatagattagtacatacctgtaaataaagacaaagaaaaattatatatatatatataaaatcagatatatataaaagtacaaatgcatcttttcagggatagctctagtatatttatagtacttatttgaagaggggcatcaacttgcagtctgggctttacctcttaagtacaagaggtgaactaatggaaccaacaagacaaaggtagcattgctgtgaccttcagcctaccttggacttgctgtgatcctgcctagtaaggtagatggtttagggaaatagcttgcagggaggagggcttagtggagaaggtctgtaggggccctgagttgagccttccaaaacattcctacaagccaaacagagagactatctgcccacctccaccagagtaccctgaccaagaaactcagggtacttaggacagaaagaggtaaaaacccaggctgggtggcttggtttggggaagtggggaggtaaccagggttgggttgttttgttttgttcttatattgtcccagcatgcaagtagaaaatatgactacaaaccaaattagtgctttttctaggacagcaagactatataaactgaacctgtatttttccagcgcatgtcccattatcatcaaaagaagaggggtaagtttagctgtgattgtcatgtagatatattttgatgctaagggctgccaagagagcctagatgtgcaataagaagtcatccagtaaaggtgcttagtgggccttgccacctaatgggatgtaagggcatagttctttaaaacgttttccagtgtagtcataaagggctttagtgtctgaagaaatcattattcccaatagcactaacttaactctgatcagcactgcttgggttgaggcaacttagcgatgcttggaaaggcatttgcacactcagtgcaccccaggaaggtttctgagtgccaggtcgagtggtaccaggaccaggctttggttaaagttcttgtaacatctatgtctcttcttccatcaagaccttatctgggattctgtctaagttttagagtacacggtatttgacagcttccttatactggtttcaagctattcactccaacaatttgatttcttgattttgctcaacattacattgaatgcatgaaattaaaatattccacgcccccaagttctgtatgacaccttgtgtgttttctcagatctatgtcagtcgaaaataaagccagcaagggggaaaaaataggcaaactgaatcaatggaaaactatgtagagcacttttcttttctccaagtcatgctttccttaaaatcagttgaaaaattgaatcaaggatggttcattattctgtacccatcctacgtctaagttggtacatatggcatatgggaaatttcaccatatgtgttcctatctccaatctattctgtcattgacgcctgctatgattttgttgtgagcacatacctcttaacataagaggacaggatgcagaactcacagcagaataagaggaaaggtaacctgacagccccagatcaagctcagtattccttccagaaaacctcagctcaccccacagagcatggcaataacaggaaatgcccatcattcctcttcacccagaagtaaaaagcacttcaaacccgaggccccctgggaaaacaagaaatcaagatggctgccagtcggaggctggctttcaagtctctccaactcggcagattggggtcttcagatgtgggacaatgccttccaagacattgaaacaccatccaatagaggcgctgagtggaacctgccacctaatgggaatgaatctcattcatcaaggtcaggactttgtactggggcaagaatttgtcctgcttccttagagagtgaaagaatgaggaagtgaactttacgtttaaaaactccagttgttttccctgtgtatttcttgaagggcaaccaagttggttattgtgtgaattttatattattgactggtgcgttgtttgaaataaggtttaaataggtgactgactcaactgcaaacagaccatgtaaaacagaagttgaaggagacctgatgccgccctcttcttattcctgatcctccctctgcctcctcactccctcccatttattcccagcttacagtgaaggctgatcaaagcagctatggtgccctttgcttgtctcggagctccacttcacaggaagtgttgtggtctttcatgtgaagttgcatttgagaagacaaaatttccaagccccgttcccacatcagtcatgtgcactgagcctgacctacaacagcactgctccctcactggatgggacacaagtgattccacagcctgcccttgctttcccttcatttctgtgtctgtaagtggttatgtgttgagccagggtaaattcagagagatgtgtacagagttcaacaatgggtctttaaaccattcaaatcattggcataattataagaactttccacaccgtggtttccaaaacaggtcatctctaactcgtttcctgcatgcctgtgtatatacatatataaatatatacatatatatatatatacatatatatatatatatatatatctttataccagatctatatgtacacatataatatgacttacatcatcaccctctgaccctatcacattcaggattctaaagcagggagcatcaagtttgccaaagtcaaggaaaaggaaagtcatgcacacaaaccaaagggaacatttcttcctgatttcataaggttgtttgttccatgcacatatatttacaaatatacacatatgtacccatattttcccaccctaagaatatcaatttatagccttaaggaaatcggtcagccatatccctaatgctgatatagaggcaaagaatacacaacagaaaatacaaagcaaaaatttagactgcagatactctctttgcttctctggagcagggtataaaagatatcaacaattcaagagccaacattgtactaatcaatctaaaataaatgagttgcacgcaaatgatttcatttattcacagcaaaccgagcaggtcttgcttgctgtcaccgcctaccctcccccatacttccaaggcagcagagcagcttggctcaaactgacaattcccaaatagaaactcctaaattgcatctgagaatgcccatgccaactccagctgccctctgcacctgaccagatcctgatgaactgaagctgaagatcagatggtgtttatgcagcttcccaggacctaaactgagtcaggcagtgacagagcaatgatatatgcagggactaagggatagggttgtttataccctcggcagatgcagcagaatgtcctaaagccttgcccagaagattataaaaagaggcggagactgttttatattcaggaaaaatgctttgtaaggcttctaacaggtgtcacctgacaagggccatcataatttattttatagggaagacatgaatcaggtggtttggagccctttcagcaaaacgcagctgcctcgctgattagacatttgacaatgttaatgtacatccattcctgggcagggagagagttggcaaactccccaccactgcacatagcttttaaaggcctctggaacagtgagagaagagatgagctacaaagggagcccacccccagaccactttaacaaaaagttgaccaaagaaaagacacctggtagagtggctggccagatagagctgaagaagatggaagttgcattaaatgctctgcagaaattactgcgttggactatctaacatgggtctgatggcaggcatttcagaacatggcagtgtgctttcctccccacatctaccaaacacacacccacacccccacacacacgcgagattatgtggatgctatgcctccttgcacctggacagattgtttttctggtaagtaggtggccctattataggtggcagctgtgttccagaagaaacaaagtgaagctgttctcagggtgatttctggagaaaactactgtctcctgaaagcatgcatagaagtcagtgctcactcttgctaagccacatattccttaacgatccggcttaatatttttaaaagatacctcctcaacccctatacctgtctcaacaatactgtcttcaattattaggtaaggccttgtcattaagagaggggtaggagaaaaaatagaataataaggaaagggaagaaaggagatattaatttcctaggattccaagaaaacaagtgtcacgtggaaatatatccctatgtagtttaaaacagtaacaaatatcaggctatgtttagccaattacaagagcccatatacagttttagatttttttaaaaaataatctcaggaagaccttgggtaagaaaagtaaccctgccctattccaccttctatttactgttagctccctgactctgcctctgcctctgtctttgcgtttcatttttaatctcagagcttcatattttttaaatatatagcaaacaagaaaagcaataagggaactactcacagccagctcaactctattacttatgattacaccatggcaatattcctttttcaccaggagctttggacctgcgcaggttgtggcatgtaatcacccggagcatgtagtcgtctgtagaaatcacaggcacactcatgtttgctctggaaggaatctgttttccacaatgactccccccagctaatgtacacactggcattttgcatgccttcctcacacatggggcaccagccttgctcagaaccacccaaactccacagaggcccttaatatggctagggacagatttcttaagaaagagtaagaagcagctacaaaggacaagcaaatccacaagtcaggcagcattcgagaggcaaaaatgaccctgcaattacgacaggctaggcaactgttttcaaattagcgtacgaacagtgagggactgtgtagagcaccatattatctaagccaaagcacttctaccagatcattcattgacagactggaaaacctaataaaatctttaaaaacagacaaatatctaagtctgaaagaatgccatggagtttgcctaggcttccaccaaagatttaattccattaagagggtttgtctagcctatcacgctaatccaaaggacagtcctcttacgggggagatcccagcatagatgctggtgtgacccagctcaatgattaacaaccatcagcatcaagaaaagcctccctccaagttaacccaaacccatccacttaatgacttaactttttttttttttttttttttttttggcaaaaagtaactgcatctgggcactcttcactctttgccccatagttggaagttaccgctatgtgactctttacctattttcaattaaaattatctttagatttttatttgagtctttaaccctcttaataatttttatagttcctctctactaagcctttttaagttctttatattgttcttaaatgatggaaccttatgactaatgataatcactgtctgaacagtgttgaactatactgggtgcagcatgaccatgaagctctggtgaagtcaaggtcacaaactgcttttaaggtcattaggtcataatctcagactcacaaagaactcaaaattggggagacaccactttagattactccaaaactctgggcctgtacttacccactaatttatcaagaggaatcaatatttttattttaaatatgaaactgggataaatgattggatctccacttattaaccagtactgcagtgtgtttatatccttttgtgtggtaggttggataggatttgtaaagctactgattgatctcatgggccagggttcaccaaaaggatgggaatttgtttctgcattcttacatattgggttgcatattccttcataatggatccataagtaactaaggccttggagactaacagttctccaaaatactcagctaaccaaaagaaaatactaatttttaaaatcatgtcataaaaaacagaaaagtaaaaaaagtctgaaatcctgaataaaattattttaaggatgaaattacatgcataaattaagggtagataacttcttgccatttaattaaacaaatccccaattcttatcagaataaaactgaaggacaatggatgccttttgggttttttaattttttaatattgcactttatagtacttcataagagacaactgtcttaattaaagccataaaataccaataatacatatattcagggcttctgaatatagtcaatcaataagcagtccatgagtcattcctgttttgtattgtttattgtaaattggagtttatctgttctattttttattaactacaattattgttctaggcaatcctaatctacttatacattttagatgtgtgctttaataaaactgtttgaaaatcaaagaaattattcatttcacaaaagcagtcttcgttttcaaaatagcttattacagtttctttagcaagttctaatactacatggaaattattttaaaattgtagatttttttcaggaatccattttgttatataaagcaaagttcacccatatggaaaatgaaatagataattagcaaacatatacctgggaaatgtaggatgtgtttgagcttttatataaatataggatgggtctaagaagttcccttataaaaatgggaaatagaggtatacaatttatcaataattccttatgcctaaattactaaccttccttgggaggacatgtaaagcagcagatttcataatgctttggtggttattttcctcctctccgctaaaatacacaatttctaacctagtatggtacactgtttacacacacatatataaagatgtccccacaactaaaaactttaatgtttcaacttcatcacaaatttttatataattttttttttaacagacagggtcttgctctgtcacccaggctagagtgcagtggtgcaatcatagctcagtgtagcctcaaacacctggactcaagcgatcctcccacttcagcctcttgagtagctgggacctcaggcacatgccaccatgcctggctaattttgttgttgttgttaagagatggagtctcactatgttacccaggctggtctcaaactcctgggctcaagagatcctcctgctttggcctcccaaagtgctgggattaaaggaatgagccaccatacccagcccttttatgtaatttgagtaaaagtaattactaaaaagcacttaatagtctagaaatccaccagaactgggtacctaaattgtccatatagagtaaacatgggtactaaactggacaaccccatcaattttatgcttaagtggccaaattgccctaaagaaagggtatctgaaccaagggccagtgatattcctctgttagaggctgttttgtggtctgaagagtttctctaaagggctgagactctattcggaagagggagcctcagttactgaattgcgctattgaaccctgaacacaaagtacacatatataccctgcatctagccttgatatttcttctgctcaagtcaaaaaactccggaagcaacagcttccaccatcaagcaatccacatacttaaaaagccatcaaagctaagaatagcaaaagctaccttcctgattcagtgaagttgctgctagcactaaaagcaagagaaattatacttttgttcttcagatacggttaaaacaaagaaaatgttgtcaacgttgacgccaacatagacatttgctctataacatataaactgtcttttagacaggttatgttaaaaatatcagaatgccatttttgtaaaggatcttttttaggatagacgtggtctcatgcttcctttgttcgcctccgttttaaaggagcattgtaacccctatcctcatccctacaaaaatccagtggatgcacttccaaattacttctgtcattttgtatgtgttgtgtttattatgcgtaattttcactggatgatgagatacatggtgatactatgtcagtttattctctgtgaatatgtctgtacatagacaggaagctctacttatttgtacataggctgtctgaagtatgtacttctgtcacatggacttcattctgataaagggtgtttcttcttgtttcactgtccatacctttgtgcttctactactgataatcaattcatagaatatcactttatgtaactaagtctcctcagtgtgaaaaataatagtaataaaattattgactcaaagaagta

SEQ ID NO: 558 - DNA, 11072 bp, Homo sapiens
gcgcatcccgttgctgctctgcaggctcacaggtggctctgccgtggatgtgggcgccccaggccccgctaggagttagccaactctctgtgctccggggcgtggatttggagcccccgcctctcctacccttgcttttggcttgggatggggggcgtggggcagggcctgccgtcgggggagacgcgcagaggggcgcttccattccccagccacctacaaacgactcagggggatgcgggccaagcgcctcaccaaatgcaacccagctccaagctcacagcataaatgatgaaagtttcctgtgaagcataacaatccctgattgtgaaagtaccccacaagcatcgttaactataaagtaaggaaaagtatgaaagaaccatctggttgagtctaaagttggaagatcaccatatccaccagaagacccaggatggatctgcaacaaagcaccaccatcacttccctagagaaatggtgtttggatgagtcactgtctggctgcagaagacattatagtgtcaagaaaaaactgaagttaattcgagtcttaggccttttcatgggtctggtagccattagcactgtctcattttcaatcagtgccttttctgagacagatacacagagcacaggagaggccagtgttgtaagtggccctagggtagcacagggttaccatcagagaactctcttagatttaaatgacaagattctggattatactccacagccacctctttctaaggaaggcgagtctgagaatagtacagatcacgcccaaggagactacccgaaagacatcttttcccttgaggagagaagaaaaggtgcgatcattctgcatgtcattggaatgatctacatgttcatagccttagccattgtctgtgatgagttctttgttccttctttgactgtcatcactgaaaaactgggcatctctgatgatgtggctggagccaccttcatggctgcaggagggtcagccccagaacttttcacatctctcataggggtatttatcgctcacagcaacgttggcataggcacaattgtaggttcagcagtattcaacatcctctttgttattggcatgtgtgctctgttttctagagaaatcttaaacctgacatggtggccgctctttcgagatgtgtctttctacattgttgacttgatcatgctgatcatatttttcctggataatgtcatcatgtggtgggaaagcttgcttctcttaacagcttatttttgctatgtggttttcatgaaattcaacgtccaagtagaaaaatgggtgaagcaaatgataaaccgcaataaggtcgtcaaggtgacagcaccagaagcccaagcaaagccatctgcagccagggacaaggatgaaccaactctaccggctaagccgcgtctccagcgaggtggaagctctgcctccctccacaacagtctcatgaggaatagcatcttccaactcatgatacacacccttgacccactcgccgaagggaggttcagagaaaaggcttcaattctccacaagatcgccaagaagaaatgtcatgtggatgagaacgagaggcagaatggggctgccaaccacgtggaaaaaattgagcttccaaacagcaccagcacagatgttgaaatgacaccatccagtgatgcttcagaacctgtacaaaatggaaatctctcccacaacattgaaggtgcagaagcccagaccgctgatgaggaggaggaccagcctctcagccttgcctggccttctgaaacccgcaagcaagtcacgtttctgattgttttccccatagtgtttcctctctggattacgttacctgacgttcgcaaaccttcatcgaggaagttttttcccatcacgttctttggctccattacctggattgcagtattctcttacttgatggtctggtgggcgcaccaggttggagagacaattggcatcagtgaagagattatgggcctgaccatcttggctgctgggacctccatccctgatcttatcaccagtgtcatagtggcccggaaggggttaggggacatggctgtgtccagctctgttggaagcaacatttttgacatcactgtagggctcccactgccctggctcctgtacaccgtcattcacagattccagccagtggctgtcagcagcaatggccttttctgtgccatcgtccttctcttcatcatgctgctcttcgtcatcctctctatcgccctctgcaagtggcgaatgaacaaaatcctgggcttcatcatgtttggcctctactttgtgttcctggtggtgagcgttctcctagaagacagaattcttacatgccccgtctccatctagcaggaaaagccatatcttgcaccagcagcatgaatggtccctccacactctgggctctgggctccttgacctcttgagaagaggcagctggcacacagccctgggtgccaagtgtccctccttggtgaatttgaggagagatggattcacactgggcccattcacttcacaggctgcttccaccctgcctactgaaatgacttcatgtaaaagacaaagagaaccgtcaatacagggcttctccctattcaccactgacaagtacacctcgctggtcggaggtacagtcgatgcaaacaaggacacaggctatatatatctataaatacacatattataaatatacgcacatgaacacacaaatcctgcctgttcctgtactatacctctccttgcatacctatagattagtacatacctgtaaataaagacaaagaaaaattatatatatatatataaaatcagatatatataaaagtacaaatgcatcttttcagggatagctctagtatatttatagtacttatttgaagaggggcatcaacttgcagtctgggctttacctcttaagtacaagaggtgaactaatggaaccaacaagacaaaggtagcattgctgtgaccttcagcctaccttggacttgctgtgatcctgcctagtaaggtagatggtttagggaaatagcttgcagggaggagggcttagtggagaaggtctgtaggggccctgagttgagccttccaaaacattcctacaagccaaacagagagactatctgcccacctccaccagagtaccctgaccaagaaactcagggtacttaggacagaaagaggtaaaaacccaggctgggtggcttggtttggggaagtggggaggtaaccagggttgggttgttttgttttgttcttatattgtcccagcatgcaagtagaaaatatgactacaaaccaaattagtgctttttctaggacagcaagactatataaactgaacctgtatttttccagcgcatgtcccattatcatcaaaagaagaggggtaagtttagctgtgattgtcatgtagatatattttgatgctaagggctgccaagagagcctagatgtgcaataagaagtcatccagtaaaggtgcttagtgggccttgccacctaatgggatgtaagggcatagttctttaaaacgttttccagtgtagtcataaagggctttagtgtctgaagaaatcattattcccaatagcactaacttaactctgatcagcactgcttgggttgaggcaacttagcgatgcttggaaaggcatttgcacactcagtgcaccccaggaaggtttctgagtgccaggtcgagtggtaccaggaccaggctttggttaaagttcttgtaacatctatgtctcttcttccatcaagaccttatctgggattctgtctaagttttagagtacacggtatttgacagcttccttatactggtttcaagctattcactccaacaatttgatttcttgattttgctcaacattacattgaatgcatgaaattaaaatattccacgcccccaagttctgtatgacaccttgtgtgttttctcagatctatgtcagtcgaaaataaagccagcaagggggaaaaaataggcaaactgaatcaatggaaaactatgtagagcacttttcttttctccaagtcatgctttccttaaaatcagttgaaaaattgaatcaaggatggttcattattctgtacccatcctacgtctaagttggtacatatggcatatgggaaatttcaccatatgtgttcctatctccaatctattctgtcattgacgcctgctatgattttgttgtgagcacatacctcttaacataagaggacaggatgcagaactcacagcagaataagaggaaaggtaacctgacagccccagatcaagctcagtattccttccagaaaacctcagctcaccccacagagcatggcaataacaggaaatgcccatcattcctcttcacccagaagtaaaaagcacttcaaacccgaggccccctgggaaaacaagaaatcaagatggctgccagtcggaggctggctttcaagtctctccaactcggcagattggggtcttcagatgtgggacaatgccttccaagacattgaaacaccatccaatagaggcgctgagtggaacctgccacctaatgggaatgaatctcattcatcaaggtcaggactttgtactggggcaagaatttgtcctgcttccttagagagtgaaagaatgaggaagtgaactttacgtttaaaaactccagttgttttccctgtgtatttcttgaagggcaaccaagttggttattgtgtgaattttatattattgactggtgcgttgtttgaaataaggtttaaataggtgactgactcaactgcaaacagaccatgtaaaacagaagttgaaggagacctgatgccgccctcttcttattcctgatcctccctctgcctcctcactccctcccatttattcccagcttacagtgaaggctgatcaaagcagctatggtgccctttgcttgtctcggagctccacttcacaggaagtgttgtggtctttcatgtgaagttgcatttgagaagacaaaatttccaagccccgttcccacatcagtcatgtgcactgagcctgacctacaacagcactgctccctcactggatgggacacaagtgattccacagcctgcccttgctttcccttcatttctgtgtctgtaagtggttatgtgttgagccagggtaaattcagagagatgtgtacagagttcaacaatgggtctttaaaccattcaaatcattggcataattataagaactttccacaccgtggtttccaaaacaggtcatctctaactcgtttcctgcatgcctgtgtatatacatatataaatatatacatatatatatatatacatatatatatatatatatatatctttataccagatctatatgtacacatataatatgacttacatcatcaccctctgaccctatcacattcaggattctaaagcagggagcatcaagtttgccaaagtcaaggaaaaggaaagtcatgcacacaaaccaaagggaacatttcttcctgatttcataaggttgtttgttccatgcacatatatttacaaatatacacatatgtacccatattttcccaccctaagaatatcaatttatagccttaaggaaatcggtcagccatatccctaatgctgatatagaggcaaagaatacacaacagaaaatacaaagcaaaaatttagactgcagatactctctttgcttctctggagcagggtataaaagatatcaacaattcaagagccaacattgtactaatcaatctaaaataaatgagttgcacgcaaatgatttcatttattcacagcaaaccgagcaggtcttgcttgctgtcaccgcctaccctcccccatacttccaaggcagcagagcagcttggctcaaactgacaattcccaaatagaaactcctaaattgcatctgagaatgcccatgccaactccagctgccctctgcacctgaccagatcctgatgaactgaagctgaagatcagatggtgtttatgcagcttcccaggacctaaactgagtcaggcagtgacagagcaatgatatatgcagggactaagggatagggttgtttataccctcggcagatgcagcagaatgtcctaaagccttgcccagaagattataaaaagaggcggagactgttttatattcaggaaaaatgctttgtaaggcttctaacaggtgtcacctgacaagggccatcataatttattttatagggaagacatgaatcaggtggtttggagccctttcagcaaaacgcagctgcctcgctgattagacatttgacaatgttaatgtacatccattcctgggcagggagagagttggcaaactccccaccactgcacatagcttttaaaggcctctggaacagtgagagaagagatgagctacaaagggagcccacccccagaccactttaacaaaaagttgaccaaagaaaagacacctggtagagtggctggccagatagagctgaagaagatggaagttgcattaaatgctctgcagaaattactgcgttggactatctaacatgggtctgatggcaggcatttcagaacatggcagtgtgctttcctccccacatctaccaaacacacacccacacccccacacacacgcgagattatgtggatgctatgcctccttgcacctggacagattgtttttctggtaagtaggtggccctattataggtggcagctgtgttccagaagaaacaaagtgaagctgttctcagggtgatttctggagaaaactactgtctcctgaaagcatgcatagaagtcagtgctcactcttgctaagccacatattccttaacgatccggcttaatatttttaaaagatacctcctcaacccctatacctgtctcaacaatactgtcttcaattattaggtaaggccttgtcattaagagaggggtaggagaaaaaatagaataataaggaaagggaagaaaggagatattaatttcctaggattccaagaaaacaagtgtcacgtggaaatatatccctatgtagtttaaaacagtaacaaatatcaggctatgtttagccaattacaagagcccatatacagttttagatttttttaaaaaataatctcaggaagaccttgggtaagaaaagtaaccctgccctattccaccttctatttactgttagctccctgactctgcctctgcctctgtctttgcgtttcatttttaatctcagagcttcatattttttaaatatatagcaaacaagaaaagcaataagggaactactcacagccagctcaactctattacttatgattacaccatggcaatattcctttttcaccaggagctttggacctgcgcaggttgtggcatgtaatcacccggagcatgtagtcgtctgtagaaatcacaggcacactcatgtttgctctggaaggaatctgttttccacaatgactccccccagctaatgtacacactggcattttgcatgccttcctcacacatggggcaccagccttgctcagaaccacccaaactccacagaggcccttaatatggctagggacagatttcttaagaaagagtaagaagcagctacaaaggacaagcaaatccacaagtcaggcagcattcgagaggcaaaaatgaccctgcaattacgacaggctaggcaactgttttcaaattagcgtacgaacagtgagggactgtgtagagcaccatattatctaagccaaagcacttctaccagatcattcattgacagactggaaaacctaataaaatctttaaaaacagacaaatatctaagtctgaaagaatgccatggagtttgcctaggcttccaccaaagatttaattccattaagagggtttgtctagcctatcacgctaatccaaaggacagtcctcttacgggggagatcccagcatagatgctggtgtgacccagctcaatgattaacaaccatcagcatcaagaaaagcctccctccaagttaacccaaacccatccacttaatgacttaactttttttttttttttttttttttttggcaaaaagtaactgcatctgggcactcttcactctttgccccatagttggaagttaccgctatgtgactctttacctattttcaattaaaattatctttagatttttatttgagtctttaaccctcttaataatttttatagttcctctctactaagcctttttaagttctttatattgttcttaaatgatggaaccttatgactaatgataatcactgtctgaacagtgttgaactatactgggtgcagcatgaccatgaagctctggtgaagtcaaggtcacaaactgcttttaaggtcattaggtcataatctcagactcacaaagaactcaaaattggggagacaccactttagattactccaaaactctgggcctgtacttacccactaatttatcaagaggaatcaatatttttattttaaatatgaaactgggataaatgattggatctccacttattaaccagtactgcagtgtgtttatatccttttgtgtggtaggttggataggatttgtaaagctactgattgatctcatgggccagggttcaccaaaaggatgggaatttgtttctgcattcttacatattgggttgcatattccttcataatggatccataagtaactaaggccttggagactaacagttctccaaaatactcagctaaccaaaagaaaatactaatttttaaaatcatgtcataaaaaacagaaaagtaaaaaaagtctgaaatcctgaataaaattattttaaggatgaaattacatgcataaattaagggtagataacttcttgccatttaattaaacaaatccccaattcttatcagaataaaactgaaggacaatggatgccttttgggttttttaattttttaatattgcactttatagtacttcataagagacaactgtcttaattaaagccataaaataccaataatacatatattcagggcttctgaatatagtcaatcaataagcagtccatgagtcattcctgttttgtattgtttattgtaaattggagtttatctgttctattttttattaactacaattattgttctaggcaatcctaatctacttatacattttagatgtgtgctttaataaaactgtttgaaaatcaaagaaattattcatttcacaaaagcagtcttcgttttcaaaatagcttattacagtttctttagcaagttctaatactacatggaaattattttaaaattgtagatttttttcaggaatccattttgttatataaagcaaagttcacccatatggaaaatgaaatagataattagcaaacatatacctgggaaatgtaggatgtgtttgagcttttatataaatataggatgggtctaagaagttcccttataaaaatgggaaatagaggtatacaatttatcaataattccttatgcctaaattactaaccttccttgggaggacatgtaaagcagcagatttcataatgctttggtggttattttcctcctctccgctaaaatacacaatttctaacctagtatggtacactgtttacacacacatatataaagatgtccccacaactaaaaactttaatgtttcaacttcatcacaaatttttatataattttttttttaacagacagggtcttgctctgtcacccaggctagagtgcagtggtgcaatcatagctcagtgtagcctcaaacacctggactcaagcgatcctcccacttcagcctcttgagtagctgggacctcaggcacatgccaccatgcctggctaattttgttgttgttgttaagagatggagtctcactatgttacccaggctggtctcaaactcctgggctcaagagatcctcctgctttggcctcccaaagtgctgggattaaaggaatgagccaccatacccagcccttttatgtaatttgagtaaaagtaattactaaaaagcacttaatagtctagaaatccaccagaactgggtacctaaattgtccatatagagtaaacatgggtactaaactggacaaccccatcaattttatgcttaagtggccaaattgccctaaagaaagggtatctgaaccaagggccagtgatattcctctgttagaggctgttttgtggtctgaagagtttctctaaagggctgagactctattcggaagagggagcctcagttactgaattgcgctattgaaccctgaacacaaagtacacatatataccctgcatctagccttgatatttcttctgctcaagtcaaaaaactccggaagcaacagcttccaccatcaagcaatccacatacttaaaaagccatcaaagctaagaatagcaaaagctaccttcctgattcagtgaagttgctgctagcactaaaagcaagagaaattatacttttgttcttcagatacggttaaaacaaagaaaatgttgtcaacgttgacgccaacatagacatttgctctataacatataaactgtcttttagacaggttatgttaaaaatatcagaatgccatttttgtaaaggatcttttttaggatagacgtggtctcatgcttcctttgttcgcctccgttttaaaggagcattgtaacccctatcctcatccctacaaaaatccagtggatgcacttccaaattacttctgtcattttgtatgtgttgtgtttattatgcgtaattttcactggatgatgagatacatggtgatactatgtcagtttattctctgtgaatatgtctgtacatagacaggaagctctacttatttgtacataggctgtctgaagtatgtacttctgtcacatggacttcattctgataaagggtgtttcttcttgtttcactgtccatacctttgtgcttctactactgataatcaattcatagaatatcactttatgtaactaagtctcctcagtgtgaaaaataatagtaataaaattattgactcaaagaagta

SEQ ID NO: 559 - DNA, 3938 bp, Homo sapiens
agattgcttcaggggggtggggtggggtggggtggggctgggggcttgtcgccctttcaggctccaccctttgcggagattataaatagtcatgatcccagcgagacccagagatgctgtaatggtaagactttggatccttcctgaggacgtggagaaaacttgctgctgagaaggacattttgaaggttttgttggctgaaaaagctgtttctggaatcacccctagatctttcttgaagacttgaattagattacagcgatggggacacagaaggtcaccccagctctgatatttgccatcacagttgctacaatcggctctttccaatttggctacaacactggggtcatcaatgctcctgagaagatcataaaggaatttatcaataaaactttgacggacaagggaaatgccccaccctctgaggtgctgctcacgtctctctggtccttgtctgtggccatattttccgtcgggggtatgatcggctccttttccgtcggactcttcgtcaaccgctttggcaggcgcaattcaatgctgattgtcaacctgttggctgtcactggtggctgctttatgggactgtgtaaagtagctaagtcggttgaaatgctgatcctgggtcgcttggttattggcctcttctgcggactctgcacaggttttgtgcccatgtacattggagagatctcgcctactgccctgcggggtgcctttggcactctcaaccagctgggcatcgttgttggaattctggtggcccagatctttggtctggaattcatccttgggtctgaagagctatggccgctgctactgggttttaccatccttcctgctatcctacaaagtgcagcccttccattttgccctgaaagtcccagatttttgctcattaacagaaaagaagaggagaatgctaagcagatcctccagcggttgtggggcacccaggatgtatcccaagacatccaggagatgaaagatgagagtgcaaggatgtcacaagaaaagcaagtcaccgtgctagagctctttagagtgtccagctaccgacagcccatcatcatttccattgtgctccagctctctcagcagctctctgggatcaatgctgtgttctattactcaacaggaatcttcaaggatgcaggtgttcaagagcccatctatgccaccatcggcgcgggtgtggttaatactatcttcactgtagtttctctatttctggtggaaagggcaggaagaaggactctgcatatgataggccttggagggatggctttttgttccacgctcatgactgtttctttgttattaaaggataactataatgggatgagctttgtctgtattggggctatcttggtctttgtagccttctttgaaattggaccaggccccattccctggtttattgtggccgaactcttcagccagggcccccgcccagctgcgatggcagtggccggctgctccaactggacctccaacttcctagtcggattgctcttcccctccgctgctcactatttaggagcctacgtttttattatcttcaccggcttcctcattaccttcttggcttttaccttcttcaaagtccctgagacccgtggcaggacttttgaggatatcacacgggcctttgaagggcaggcacacggtgcagatagatctggaaaggacggcgtcatggagatgaacagcatcgagcctgctaaggagaccaccaccaatgtctaagtcgtgcctccttccacctccctcccggcatgggaaagccacctctccctcaacaagggagagacctcatcaggatgaacccaggacgcttctgaatgctgctacttaattcctttctcatcccacgcactccatgagcaccccaaggctgcggtttgttggatcttcaatggctttttaaattttatttcctggacatcctcttctgcttaggagagaccgagtgaacctaccttcatttcaggagggattggccgcttggcacatgacaactttgccagcttttcctcccttgggttctgatattgccgcactaggggatataggagaggaaaagtaaggtgcagttcccccaacctcagacttaccaggaagcagatacatatgagtgtggaagccggagggtgtttatgtaagagcaccttcctcacttccatacagctctacgtggcaaattaacttgagttttatttattttatcctctggtttaattacataattttttttttttaactttaagtttcaggatacatgtgccgaatgtgcaggtttgttacataggtatatatatgccatgatggaaatatttatttttttaagcgtaattttgccaaataataaaaacagaaggaaattgagattagagggaggtgtttaaagagaggttatagagtagaagatttgatgctggagaggttaaggtgcaataagaatttagggagaaatgttgttcattattggagggtaaatgatgtggtgcctgaggtctgtacgttacctcttaacaatttctgtccttcagatggaaactctttaacttctcgtaaaagtcatatacctatataataaagctactgatttcctttggagcttttttctttaagataatagtttacatgtagtagtacttgaaatctaggattattaactaatatgggcattgtagttaatgatggttgatgggttctaattttggatggagtccagggaagagaaagtgatttctagaaagcctgttcccctcactggatgaaataactccttcttgtagtagtctcattacttttgaagtaatcccgccacctatctcgtgggagagccatccaaataagaaacctaaaataattggttcttggtagagattcattatttttccactttgttctttaggagattttaggtgttgattttctgttgtattttaactcatacctttaaaggaattccccaaagaatgtttatagcaaacttggaatttgtaacctcagctctgggagaggatttttttctgagcgattattatctaaagtgtgttgttgctttaggctcacggcacgcttgcgtatgtctgttaccatgtcactgtggtcctatgccgaatgccctcaggggacttgaatctttccaataaaccaggtttagacagtatgagtcaatgtgcagtgtagcccacacttgagaggatgaatgtatgtgcactgtcactttgctctgggtggaagtacgttattgttgacttattttctctgtgtttgttcctacagcccctttttcatatgttgctcagtctccctttcccttcttggtgcttacacatctcagaccctttagccaaacccttgtcagtgacagtattttggttcttagttctcactgttccctctgctcctggagcctttgaataaaaatgcacgtagctgaggccggatgcggtggctcacgcctgtaatcccagcactttgggaggcctaggcgggcggtcaggggttcgagaccagtctggccaacatcgtgaaaccctgtctctactaaaaatgcaaaaattagccgggcgtggtggcgggcgcctgtaatcccagctacttgggaagctgaggcgggagaatcatgtgaacccgggacgcaggggttgcagtgagcggagatcgcatcattgcactctagcctgggccacagggcgagactccgtctcaaaaaaaaaaaaatgcacatagctatcaagtgtgctttagcttgaaaaggtgaccttgcaacttcatgtcaacttctggctcctcaaacagtaggttggcagtaaggcagggtcccatttctcactgagaagattgtgaatatttccatatggattttctattgttactctggttctttgttttaaaataaaaattctgaatgtacacgaca

SEQ ID NO: 560 - DNA, 4273 bp, Homo sapiens
tcctgcttcacaggctccgcggcctccggcctcctcggcccccgtcccccggcctcctcggcccccgtcccccgccatccgccgcccggatcctcgccgccctccctaggccgccccgccgccatgggcctgcgcccgccgcgccgccgggccgagggcagctgaggcgcggtgcgaagatgggcgaggacagagcagggcccgagcgccagccccagcagcccgggcgccccgcgcgcgcccgcccgcgccgccgaggggatgcccgcgcccgccgccgcgccctgagcgcctttgtctgccgcccgcgcccttccgcaccactagcctctcgggagcatggcgtcggccccgccggcctcgcccccgggctcggagccgccggggcccgacccggagccgggcgggccggacgggccgggggcggcacaactggctccgggccctgcggagctacgcctcggagcgcccgtcggcggccccgacccgcagtccccgggcctggatgagcctgcgcccggggccgctgcagatggcggggcgcgttggagcgccgggccggccccggggctggagggaggcccgcgagaccccgggccgtccgccccgccgccgcgctccggcccgcgggggcagcttgcgagccccgacgccccgggcccagggccgcgctccgaagcgccgcttccagaactcgacccgttgttctcctggactgaggagcccgaggagtgtggccccgcgagctgcccggagagcgcgcctttccgcttgcaggggtccagcagcagccaccgagcgcggggcgaggtcgacgtcttctctcccttccccgcgcccacggcgggcgagctggcgctggagcaaggtcccgggtccccgccgcagccctcggacctcagccagacccacccccttccgagcgagcccgtggggagtcaggaggacggcccccgcctccgagccgtgttcgatgccctggacggggatggggacggtttcgtccgcatcgaggacttcatccagtttgctacggtctacggggcagagcaggtgaaggacttaactaagtacttggatcccagtgggctcggcgtgatcagctttgaagacttctaccaagggatcacagccatcagaaacggagatcctgatggccagtgctacggtggtgtcgcttctgcccaagatgaggagcccctggcctgcccggacgagttcgatgacttcgtcacctatgaggccaacgaggtgacggacagcgcgtacatgggctccgagagcacctacagtgagtgtgagaccttcacggacgaggacaccagcaccctggtgcaccctgagctgcaacctgaaggggacgcagacagtgccggcggctcggccgtgccctctgagtgcctggacgccatggaggagcccgaccatggtgccctgctgctgctcccaggcaggcctcacccccatggccagtctgtcatcacggtgatcgggggcgaggagcactttgaggactacggtgaaggcagtgaggcggagctgtccccagagaccctatgcaacgggcagctgggctgcagtgaccccgctttcctcacgcccagtccgacaaagcggctctccagcaagaaggtggcaaggtacctgcaccagtcaggggccctgaccatggaggccctggaggacccttcccccgagctcatggagggcccagaggaggacattgctgacaaggttgtcttcctggaaaggcgtgtgctggagctggaaaaggacacggcagccaccggtgagcaacacagccgcctgaggcaggagaacctgcagctggtgcacagagcaaacgccctggaggagcagctgaaggagcaggagctgagagcctgcgagatggtcctggaagagacccggcgtcagaaggagctcctgtgcaagatggagagggagaagagcattgagatcgagaacctgcagaccaggctacagcaactggacgaggagaacagtgaactccggtcctgcacgccctgtctgaaggccaacattgagcgtctggaggaggagaagcagaagctgttggatgagatagagtcgctgacgctgcggctcagtgaagagcaggagaacaagaggagaatgggggacaggctgagtcacgagaggcaccagttccagagggacaaggaggccacccaggagctgatcgaggacctccgaaagcagctggagcacctgcagctcctcaagctggaggccgagcagcggcggggccgcagcagcagcatgggcctgcaggagtaccacagccgcgcccgggagagcgagctggagcaggaggtccgcaggctgaagcaggacaaccgcaacctgaaggagcagaacgaggagctgaacgggcagatcattaccctcagcatccagggcgccaagagcctcttctccacagccttctctgagtccctggctgcagagatcagctccgtctcccgagatgagctcatggaggcgattcagaagcaggaggagatcaacttccgcctgcaggactacatcgacaggatcatcgtggccatcatggagaccaacccgtccatcctggaggtcaagtagaggcaggaaggtccagcctgagctggattcgggactccaacaccctggagtggttccgtcagaccatgaggagccaagaccagcaggtcccacagccgacagtgcccagagcatgcagggaaccctcgtgcagctgagctggggccgccaaagaccggggctgccaaaggggcagagggtggtggagaggagagggagaaagggaagtcccagggcccggggtccacagaggatgagggttgtggcagggccgtccatcagcgctgaccttccgggggcccagagcttcccagccctgagtcaagctggccatgaacgcgtacacttcagttcagcaggatgggctggagagcctctctgtgcagcggtgtggggtgagccctgctgtggcctccttgtggtggtccctcttcccacgtgcagccctgttgggaagaaaggaagaaaacaggtccctccaggggtgctgctgcctaagccacccacataagtacgctggtgccgtgtcacccatgttgagccgctcctgatggctgacgggctcccagaccctcacctcggacatggtggtgggggaaggacgggtgggcaaggctggtgcgttccccagctctccctacgctgctcgggccattgcccagccagatgtggtcacctcagtccagctctggggcctccaggccatgtggctgttcccacggcccagtcctcgctgcagtaacccctgggggctctgaccacctatgggggccgggcaggagcctctggggcctccactccgacatcaggacctgagatgaccgctgtgtggcgctctctccctgggcagggtggatgccacaggcccctctggctcccaggtgctgcttctccacaggtgcggcctggcccggcctcctaaaggccacaccctccccacgcacttcccaggccagaatccaaacatcgggaaccctgttttcttctgggtgtgtctcacttagaaatcgtggttcttccccgagggtgcatgttgcaggagggagagggcagggaagactcacagcagagcaggagggggcctgtgcttctcggggtctgcaccccaggcacagcggtgtcaccccgcaggaccgcgggcctgccccaacccccagcattcccgggtgggcccagaccccatcaccaagactggccacccgctgcgtgtgtgtgcgcgcgcgtgtacgtgtggccccacatccgccgccttccacgctaggatgtaagaggtcgcctcctattgtacatttggggaaagccttgggtgtaaatcagtgtaaacttggaggagagatttttctatcatgtagagtaggtattttttatagattgaaggttgatcaattttttaatactttcaagagaaaactgtgtatacacatgaaatatatatatatatatatatatatatatgtataatatataaagactggcaccctgcctctctgtgcccaggcccagccctggtgacatggcaccactcagcagtgctgtcactgtaagcatggactcccaggagacagtgtgggaaacgctcctgctttaattccccgagaaacggctcttcctgcctggatgcaggagggcaggggccaccacagattaaagctgttactgcacaaaaaaaaaaaaaaaaaaaaaa

SEQ ID NO: 561 - DNA, 3227 bp, Homo sapiens
attagagcgtgtctgggagcaggttaaactttctcctaggtggtgatgtgcctccaggtgagcgcacaggctttgcagaaaccccagcatgacaagcaagtaggaaggtgacattgttgtttgagaaaagccagtgacccggttgggacggagacacgatggggagccggtctccaacagcatgcccttcctgaaggccaacgaggtgacggacagcgcgtacatgggctccgagagcacctacagtgagtgtgagaccttcacggacgaggacaccagcaccctggtgcaccctgagctgcaacctgaaggggacgcagacagtgccggcggctcggccgtgccctctgagtgcctggacgccatggaggagcccgaccatggtgccctgctgctgctcccaggcaggcctcacccccatggccagtctgtcatcacggtgatcgggggcgaggagcactttgaggactacggtgaaggcagtgaggcggagctgtccccagagaccctatgcaacgggcagctgggctgcagtgaccccgctttcctcacgcccagtccgacaaagcggctctccagcaagaaggtggcaaggtacctgcaccagtcaggggccctgaccatggaggccctggaggacccttcccccgagctcatggagggcccagaggaggacattgctgacaaggttgtcttcctggaaaggcgtgtgctggagctggaaaaggacacggcagccaccggtgagcaacacagccgcctgaggcaggagaacctgcagctggtgcacagagcaaacgccctggaggagcagctgaaggagcaggagctgagagcctgcgagatggtcctggaagagacccggcgtcagaaggagctcctgtgcaagatggagagggagaagagcattgagatcgagaacctgcagaccaggctacagcaactggacgaggagaacagtgaactccggtcctgcacgccctgtctgaaggccaacattgagcgtctggaggaggagaagcagaagctgttggatgagatagagtcgctgacgctgcggctcagtgaagagcaggagaacaagaggagaatgggggacaggctgagtcacgagaggcaccagttccagagggacaaggaggccacccaggagctgatcgaggacctccgaaagcagctggagcacctgcagctcctcaagctggaggccgagcagcggcggggccgcagcagcagcatgggcctgcaggagtaccacagccgcgcccgggagagcgagctggagcaggaggtccgcaggctgaagcaggacaaccgcaacctgaaggagcagaacgaggagctgaacgggcagatcattaccctcagcatccagggcgccaagagcctcttctccacagccttctctgagtccctggctgcagagatcagctccgtctcccgagatgagctcatggaggcgattcagaagcaggaggagatcaacttccgcctgcaggactacatcgacaggatcatcgtggccatcatggagaccaacccgtccatcctggaggtcaagtagaggcaggaaggtccagcctgagctggattcgggactccaacaccctggagtggttccgtcagaccatgaggagccaagaccagcaggtcccacagccgacagtgcccagagcatgcagggaaccctcgtgcagctgagctggggccgccaaagaccggggctgccaaaggggcagagggtggtggagaggagagggagaaagggaagtcccagggcccggggtccacagaggatgagggttgtggcagggccgtccatcagcgctgaccttccgggggcccagagcttcccagccctgagtcaagctggccatgaacgcgtacacttcagttcagcaggatgggctggagagcctctctgtgcagcggtgtggggtgagccctgctgtggcctccttgtggtggtccctcttcccacgtgcagccctgttgggaagaaaggaagaaaacaggtccctccaggggtgctgctgcctaagccacccacataagtacgctggtgccgtgtcacccatgttgagccgctcctgatggctgacgggctcccagaccctcacctcggacatggtggtgggggaaggacgggtgggcaaggctggtgcgttccccagctctccctacgctgctcgggccattgcccagccagatgtggtcacctcagtccagctctggggcctccaggccatgtggctgttcccacggcccagtcctcgctgcagtaacccctgggggctctgaccacctatgggggccgggcaggagcctctggggcctccactccgacatcaggacctgagatgaccgctgtgtggcgctctctccctgggcagggtggatgccacaggcccctctggctcccaggtgctgcttctccacaggtgcggcctggcccggcctcctaaaggccacaccctccccacgcacttcccaggccagaatccaaacatcgggaaccctgttttcttctgggtgtgtctcacttagaaatcgtggttcttccccgagggtgcatgttgcaggagggagagggcagggaagactcacagcagagcaggagggggcctgtgcttctcggggtctgcaccccaggcacagcggtgtcaccccgcaggaccgcgggcctgccccaacccccagcattcccgggtgggcccagaccccatcaccaagactggccacccgctgcgtgtgtgtgcgcgcgcgtgtacgtgtggccccacatccgccgccttccacgctaggatgtaagaggtcgcctcctattgtacatttggggaaagccttgggtgtaaatcagtgtaaacttggaggagagatttttctatcatgtagagtaggtattttttatagattgaaggttgatcaattttttaatactttcaagagaaaactgtgtatacacatgaaatatatatatatatatatatatatatatgtataatatataaagactggcaccctgcctctctgtgcccaggcccagccctggtgacatggcaccactcagcagtgctgtcactgtaagcatggactcccaggagacagtgtgggaaacgctcctgctttaattccccgagaaacggctcttcctgcctggatgcaggagggcaggggccaccacagattaaagctgttactgcacaaaaaaaaaaaaaaaaaaaaaa

SEQ ID NO: 562 - DNA, 3271 bp, Homo sapiens
gcagaaaccccagcatgacaagcaagtaggaaggtgacattgttgtttgagaaaagccagtgacccggttgggacggagacacgatggggagccggtctccaacagcatgcccttcctgaaggccaacgaggtgacggacagcgcgtacatgggctccgagagcacctacagtgagtgtgagaccttcacggacgaggacaccagcaccctggtgcaccctgagctgcaacctgaaggggacgcagacagtgccggcggctcggccgtgccctctgagtgcctggacgccatggaggagcccgaccatggtgccctgctgctgctcccaggcaggcctcacccccatggccagtctgtcatcacggtgatcgggggcgaggagcactttgaggactacggtgaaggcagtgaggcggagctgtccccagagaccctatgcaacgggcagctgggctgcagtgaccccgctttcctcacgcccagcactgaccctcttgccgcaaagctgcacagcatcctcactgatgaggcgtttgagttttactgtagccagtgccacaaacaaatcaaccgccttgaggatctttctgcccgcctgagtgatcttgaaatgaatagtccgacaaagcggctctccagcaagaaggtggcaaggtacctgcaccagtcaggggccctgaccatggaggccctggaggacccttcccccgagctcatggagggcccagaggaggacattgctgacaaggttgtcttcctggaaaggcgtgtgctggagctggaaaaggacacggcagccaccggtgagcaacacagccgcctgaggcaggagaacctgcagctggtgcacagagcaaacgccctggaggagcagctgaaggagcaggagctgagagcctgcgagatggtcctggaagagacccggcgtcagaaggagctcctgtgcaagatggagagggagaagagcattgagatcgagaacctgcagaccaggctacagcaactggacgaggagaacagtgaactccggtcctgcacgccctgtctgaaggccaacattgagcgtctggaggaggagaagcagaagctgttggatgagatagagtcgctgacgctgcggctcagtgaagagcaggagaacaagaggagaatgggggacaggctgagtcacgagaggcaccagttccagagggacaaggaggccacccaggagctgatcgaggacctccgaaagcagctggagcacctgcagctcctcaagctggaggccgagcagcggcggggccgcagcagcagcatgggcctgcaggagtaccacagccgcgcccgggagagcgagctggagcaggaggtccgcaggctgaagcaggacaaccgcaacctgaaggagcagaacgaggagctgaacgggcagatcattaccctcagcatccagggcgccaagagcctcttctccacagccttctctgagtccctggctgcagagatcagctccgtctcccgagatgagctcatggaggcgattcagaagcaggaggagatcaacttccgcctgcaggactacatcgacaggatcatcgtggccatcatggagaccaacccgtccatcctggaggtcaagtagaggcaggaaggtccagcctgagctggattcgggactccaacaccctggagtggttccgtcagaccatgaggagccaagaccagcaggtcccacagccgacagtgcccagagcatgcagggaaccctcgtgcagctgagctggggccgccaaagaccggggctgccaaaggggcagagggtggtggagaggagagggagaaagggaagtcccagggcccggggtccacagaggatgagggttgtggcagggccgtccatcagcgctgaccttccgggggcccagagcttcccagccctgagtcaagctggccatgaacgcgtacacttcagttcagcaggatgggctggagagcctctctgtgcagcggtgtggggtgagccctgctgtggcctccttgtggtggtccctcttcccacgtgcagccctgttgggaagaaaggaagaaaacaggtccctccaggggtgctgctgcctaagccacccacataagtacgctggtgccgtgtcacccatgttgagccgctcctgatggctgacgggctcccagaccctcacctcggacatggtggtgggggaaggacgggtgggcaaggctggtgcgttccccagctctccctacgctgctcgggccattgcccagccagatgtggtcacctcagtccagctctggggcctccaggccatgtggctgttcccacggcccagtcctcgctgcagtaacccctgggggctctgaccacctatgggggccgggcaggagcctctggggcctccactccgacatcaggacctgagatgaccgctgtgtggcgctctctccctgggcagggtggatgccacaggcccctctggctcccaggtgctgcttctccacaggtgcggcctggcccggcctcctaaaggccacaccctccccacgcacttcccaggccagaatccaaacatcgggaaccctgttttcttctgggtgtgtctcacttagaaatcgtggttcttccccgagggtgcatgttgcaggagggagagggcagggaagactcacagcagagcaggagggggcctgtgcttctcggggtctgcaccccaggcacagcggtgtcaccccgcaggaccgcgggcctgccccaacccccagcattcccgggtgggcccagaccccatcaccaagactggccacccgctgcgtgtgtgtgcgcgcgcgtgtacgtgtggccccacatccgccgccttccacgctaggatgtaagaggtcgcctcctattgtacatttggggaaagccttgggtgtaaatcagtgtaaacttggaggagagatttttctatcatgtagagtaggtattttttatagattgaaggttgatcaattttttaatactttcaagagaaaactgtgtatacacatgaaatatatatatatatatatatatatatatgtataatatataaagactggcaccctgcctctctgtgcccaggcccagccctggtgacatggcaccactcagcagtgctgtcactgtaagcatggactcccaggagacagtgtgggaaacgctcctgctttaattccccgagaaacggctcttcctgcctggatgcaggagggcaggggccaccacagattaaagctgttactgcacacgca

SEQ ID NO: 563 - DNA, 4426 bp, Homo sapiens
gtacctcaggcgcctcagcctccttagtctcctcatcctgcttcacaggctccgcggcctccggcctcctcggcccccgtcccccggcctcctcggcccccgtcccccgccatccgccgcccggatcctcgccgccctccctaggccgccccgccgccatgggcctgcgcccgccgcgccgccgggccgagggcagctgaggcgcggtgcgaagatgggcgaggacagagcagggcccgagcgccagccccagcagcccgggcgccccgcgcgcgcccgcccgcgccgccgaggggatgcccgcgcccgccgccgcgccctgagcgcctttgtctgccgcccgcgcccttccgcaccactagcctctcgggagcatggcgtcggccccgccggcctcgcccccgggctcggagccgccggggcccgacccggagccgggcgggccggacgggccgggggcggcacaactggctccgggccctgcggagctacgcctcggagcgcccgtcggcggccccgacccgcagtccccgggcctggatgagcctgcgcccggggccgctgcagatggcggggcgcgttggagcgccgggccggccccggggctggagggaggcccgcgagaccccgggccgtccgccccgccgccgcgctccggcccgcgggggcagcttgcgagccccgacgccccgggcccagggccgcgctccgaagcgccgcttccagaactcgacccgttgttctcctggactgaggagcccgaggagtgtggccccgcgagctgcccggagagcgcgcctttccgcttgcaggggtccagcagcagccaccgagcgcggggcgaggtcgacgtcttctctcccttccccgcgcccacggcgggcgagctggcgctggagcaaggtcccgggtccccgccgcagccctcggacctcagccagacccacccccttccgagcgagcccgtggggagtcaggaggacggcccccgcctccgagccgtgttcgatgccctggacggggatggggacggtttcgtccgcatcgaggacttcatccagtttgctacggtctacggggcagagcaggtgaaggacttaactaagtacttggatcccagtgggctcggcgtgatcagctttgaagacttctaccaagggatcacagccatcagaaacggagatcctgatggccagtgctacggtggtgtcgcttctgcccaagatgaggagcccctggcctgcccggacgagttcgatgacttcgtcacctatgaggccaacgaggtgacggacagcgcgtacatgggctccgagagcacctacagtgagtgtgagaccttcacggacgaggacaccagcaccctggtgcaccctgagctgcaacctgaaggggacgcagacagtgccggcggctcggccgtgccctctgagtgcctggacgccatggaggagcccgaccatggtgccctgctgctgctcccaggcaggcctcacccccatggccagtctgtcatcacggtgatcgggggcgaggagcactttgaggactacggtgaaggcagtgaggcggagctgtccccagagaccctatgcaacgggcagctgggctgcagtgaccccgctttcctcacgcccagcactgaccctcttgccgcaaagctgcacagcatcctcactgatgaggcgtttgagttttactgtagccagtgccacaaacaaatcaaccgccttgaggatctttctgcccgcctgagtgatcttgaaatgaatagtccgacaaagcggctctccagcaagaaggtggcaaggtacctgcaccagtcaggggccctgaccatggaggccctggaggacccttcccccgagctcatggagggcccagaggaggacattgctgacaaggttgtcttcctggaaaggcgtgtgctggagctggaaaaggacacggcagccaccggtgagcaacacagccgcctgaggcaggagaacctgcagctggtgcacagagcaaacgccctggaggagcagctgaaggagcaggagctgagagcctgcgagatggtcctggaagagacccggcgtcagaaggagctcctgtgcaagatggagagggagaagagcattgagatcgagaacctgcagaccaggctacagcaactggacgaggagaacagtgaactccggtcctgcacgccctgtctgaaggccaacattgagcgtctggaggaggagaagcagaagctgttggatgagatagagtcgctgacgctgcggctcagtgaagagcaggagaacaagaggagaatgggggacaggctgagtcacgagaggcaccagttccagagggacaaggaggccacccaggagctgatcgaggacctccgaaagcagctggagcacctgcagctcctcaagctggaggccgagcagcggcggggccgcagcagcagcatgggcctgcaggagtaccacagccgcgcccgggagagcgagctggagcaggaggtccgcaggctgaagcaggacaaccgcaacctgaaggagcagaacgaggagctgaacgggcagatcattaccctcagcatccagggcgccaagagcctcttctccacagccttctctgagtccctggctgcagagatcagctccgtctcccgagatgagctcatggaggcgattcagaagcaggaggagatcaacttccgcctgcaggactacatcgacaggatcatcgtggccatcatggagaccaacccgtccatcctggaggtcaagtagaggcaggaaggtccagcctgagctggattcgggactccaacaccctggagtggttccgtcagaccatgaggagccaagaccagcaggtcccacagccgacagtgcccagagcatgcagggaaccctcgtgcagctgagctggggccgccaaagaccggggctgccaaaggggcagagggtggtggagaggagagggagaaagggaagtcccagggcccggggtccacagaggatgagggttgtggcagggccgtccatcagcgctgaccttccgggggcccagagcttcccagccctgagtcaagctggccatgaacgcgtacacttcagttcagcaggatgggctggagagcctctctgtgcagcggtgtggggtgagccctgctgtggcctccttgtggtggtccctcttcccacgtgcagccctgttgggaagaaaggaagaaaacaggtccctccaggggtgctgctgcctaagccacccacataagtacgctggtgccgtgtcacccatgttgagccgctcctgatggctgacgggctcccagaccctcacctcggacatggtggtgggggaaggacgggtgggcaaggctggtgcgttccccagctctccctacgctgctcgggccattgcccagccagatgtggtcacctcagtccagctctggggcctccaggccatgtggctgttcccacggcccagtcctcgctgcagtaacccctgggggctctgaccacctatgggggccgggcaggagcctctggggcctccactccgacatcaggacctgagatgaccgctgtgtggcgctctctccctgggcagggtggatgccacaggcccctctggctcccaggtgctgcttctccacaggtgcggcctggcccggcctcctaaaggccacaccctccccacgcacttcccaggccagaatccaaacatcgggaaccctgttttcttctgggtgtgtctcacttagaaatcgtggttcttccccgagggtgcatgttgcaggagggagagggcagggaagactcacagcagagcaggagggggcctgtgcttctcggggtctgcaccccaggcacagcggtgtcaccccgcaggaccgcgggcctgccccaacccccagcattcccgggtgggcccagaccccatcaccaagactggccacccgctgcgtgtgtgtgcgcgcgcgtgtacgtgtggccccacatccgccgccttccacgctaggatgtaagaggtcgcctcctattgtacatttggggaaagccttgggtgtaaatcagtgtaaacttggaggagagatttttctatcatgtagagtaggtattttttatagattgaaggttgatcaattttttaatactttcaagagaaaactgtgtatacacatgaaatatatatatatatatatatatatatatgtataatatataaagactggcaccctgcctctctgtgcccaggcccagccctggtgacatggcaccactcagcagtgctgtcactgtaagcatggactcccaggagacagtgtgggaaacgctcctgctttaattccccgagaaacggctcttcctgcctggatgcaggagggcaggggccaccacagattaaagctgttactgcacacgca

SEQ ID NO: 564 - DNA, 2316 bp, Homo sapiens
tagttctccgggtacctcaggcgcctcagcctccttagtctcctcatcctgcttcacaggctccgcggcctccggcctcctcggcccccgtcccccggcctcctcggcccccgtcccccgccatccgccgcccggatcctcgccgccctccctaggccgccccgccgccatgggcctgcgcccgccgcgccgccgggccgagggcagctgaggcgcggtgcgaagatgggcgaggacagagcagggcccgagcgccagccccagcagcccgggcgccccgcgcgcgcccgcccgcgccgccgaggggatgcccgcgcccgccgccgcgccctgagcgcctttgtctgccgcccgcgcccttccgcaccactagcctctcgggagcatggcgtcggccccgccggcctcgcccccgggctcggagccgccggggcccgacccggagccgggcgggccggacgggccgggggcggcacaactggctccgggccctgcggagctacgcctcggagcgcccgtcggcggccccgacccgcagtccccgggcctggatgagcctgcgcccggggccgctgcagatggcggggcgcgttggagcgccgggccggccccggggctggagggaggcccgcgagaccccgggccgtccgccccgccgccgcgctccggcccgcgggggcagcttgcgagccccgacgccccgggcccagggccgcgctccgaagcgccgcttccagaactcgacccgttgttctcctggactgaggagcccgaggagtgtggccccgcgagctgcccggagagcgcgcctttccgcttgcaggggtccagcagcagccaccgagcgcggggcgaggtcgacgtcttctctcccttccccgcgcccacggcgggcgagctggcgctggagcaaggtcccgggtccccgccgcagccctcggacctcagccagacccacccccttccgagcgagcccgtggggagtcaggaggacggcccccgcctccgagccgtgttcgatgccctggacggggatggggacggtttcgtccgcatcgaggacttcatccagtttgctacggtctacggggcagagcaggtgaaggacttaactaagtacttggatcccagtgggctcggcgtgatcagctttgaagacttctaccaagggatcacagccatcagaaacggagatcctgatggccagtgctacggtggtgtcgcttctgcccaagatgaggagcccctggcctgcccggacgagttcgatgacttcgtcacctatgaggccaacgaggtgacggacagcgcgtacatgggctccgagagcacctacagtgagtgtgagaccttcacggacgaggacaccagcaccctggtgcaccctgagctgcaacctgaaggggacgcagacagtgccggcggctcggccgtgccctctgagtgcctggacgccatggaggagcccgaccatggtgccctgctgctgctcccaggcaggcctcacccccatggccagtctgtcatcacggtgatcgggggcgaggagcactttgaggactacggtgaaggcagtgaggcggagctgtccccagagaccctatgcaacgggcagctgggctgcagtgaccccgctttcctcacgcccagcactgaccctcttgccgcaaagctgcacagcatcctcactgatgaggcgtttgagttttactgtagccagtgccacaaacaaatcaaccgccttgaggatctttctgcccgcctgagtgatcttgaaatgaatagtccgacaaagcggctctccagcaagaaggtggcaaggtacctgcaccagtcaggggccctgaccatggaggccctggaggacccttcccccgagctcatggagggcccagaggaggacattgctgacaaggtttccccaaggggtctcgtggccatgtgagaaaaaggagtcttcctgttgtgcacgaagggccagctgggaggagtggactgggcagtgagtgagcaccctcgggtatcccacccccactgtgtctgagtcgggctgggggacacccagacattcagtccaccaggcccatggagacgcgacctggggcacccatgatttgggagaaaagggctggccctgcagttactgcagagccaacagcctgaggaacgggcttctcctggggccttgaatggaatgggtgacagcagccagggcaaggcagccttgccgtggtcaagacccgcttttcagccagatgtggtggctcacgcctggaatcccagcacattaggaggcctaggcgggcagatcacttg

SEQ ID NO: 565 - DNA, 4077 bp, Homo sapiens
gataccctattcggggaccctccactggtagtcttcaggtaaataaacctttgattgattggttgattggttgattgattgatattctgaatggttccagtcagacccatttctctttactgggagcatcgcagtgctcacaccggggtggtcgggtaaaatgtgcagttagtcatggccgagctagtgggtctgctggctcgcactgttttcccagggatcctttcagcaggcagcttataacgggaaagttgctgctatggtgtctgagtaagtggggagagtagaaggggatggactgtggcgccgctgagttcctgggcatggtgatgtctgaggatctgagcaggtggagcccagggggtggtggggctgtttgtcgggtttctggaagagcgaagggaaagtcagggagtgtaaggcgcatctcacagaatcgtcgggccgcgctctctcccgtcctccctccttctcccactactggcgatgtctggagcaaagagctgccttagtgaaatgatagtgaaatgtgtcttttgtgcaaaccattatcagcttaggaagccaaaaacaaaagccactctgttttcagccctgactgactaaccgttttttaaaccagcaaggacacttcctgaactttgccttcccctccctgggcaacaccagcaggaggtttattagagcgtgtctgggagcaggttaaactttctcctaggtggtgatgtgcctccaggtgagcgcacaggctttgcagaaaccccagcatgacaagcaagtaggaaggtgacattgttgtttgagaaaagccagtgacccggttgggacggagacacgatggggagccggtctccaacagcatgcccttcctgaaggtgtgtacagagccaggcccagcctgtgaggccacccgggccagcatctgagggccaacgaggtgacggacagcgcgtacatgggctccgagagcacctacagtgagtgtgagaccttcacggacgaggacaccagcaccctggtgcaccctgagctgcaacctgaaggggacgcagacagtgccggcggctcggccgtgccctctgagtgcctggacgccatggaggagcccgaccatggtgccctgctgctgctcccaggcaggcctcacccccatggccagtctgtcatcacggtgatcgggggcgaggagcactttgaggactacggtgaaggcagtgaggcggagctgtccccagagaccctatgcaacgggcagctgggctgcagtgaccccgctttcctcacgcccagcactgaccctcttgccgcaaagctgcacagcatcctcactgatgaggcgtttgagttttactgtagccagtgccacaaacaaatcaaccgccttgaggatctttctgcccgcctgagtgatcttgaaatgaatagtccgacaaagcggctctccagcaagaaggtggcaaggtacctgcaccagtcaggggccctgaccatggaggccctggaggacccttcccccgagctcatggagggcccagaggaggacattgctgacaaggttgtcttcctggaaaggcgtgtgctggagctggaaaaggacacggcagccaccggtgagcaacacagccgcctgaggcaggagaacctgcagctggtgcacagagcaaacgccctggaggagcagctgaaggagcaggagctgagagcctgcgagatggtcctggaagagacccggcgtcagaaggagctcctgtgcaagatggagagggagaagagcattgagatcgagaacctgcagaccaggctacagcaactggacgaggagaacagtgaactccggtcctgcacgccctgtctgaaggccaacattgagcgtctggaggaggagaagcagaagctgttggatgagatagagtcgctgacgctgcggctcagtgaagagcaggagaacaagaggagaatgggggacaggctgagtcacgagaggcaccagttccagagggacaaggaggccacccaggagctgatcgaggacctccgaaagcagctggagcacctgcagctcctcaagctggaggccgagcagcggcggggccgcagcagcagcatgggcctgcaggagtaccacagccgcgcccgggagagcgagctggagcaggaggtccgcaggctgaagcaggacaaccgcaacctgaaggagcagaacgaggagctgaacgggcagatcattaccctcagcatccagggcgccaagagcctcttctccacagccttctctgagtccctggctgcagagatcagctccgtctcccgagatgagctcatggaggcgattcagaagcaggaggagatcaacttccgcctgcaggactacatcgacaggatcatcgtggccatcatggagaccaacccgtccatcctggaggtcaagtagaggcaggaaggtccagcctgagctggattcgggactccaacaccctggagtggttccgtcagaccatgaggagccaagaccagcaggtcccacagccgacagtgcccagagcatgcagggaaccctcgtgcagctgagctggggccgccaaagaccggggctgccaaaggggcagagggtggtggagaggagagggagaaagggaagtcccagggcccggggtccacagaggatgagggttgtggcagggccgtccatcagcgctgaccttccgggggcccagagcttcccagccctgagtcaagctggccatgaacgcgtacacttcagttcagcaggatgggctggagagcctctctgtgcagcggtgtggggtgagccctgctgtggcctccttgtggtggtccctcttcccacgtgcagccctgttgggaagaaaggaagaaaacaggtccctccaggggtgctgctgcctaagccacccacataagtacgctggtgccgtgtcacccatgttgagccgctcctgatggctgacgggctcccagaccctcacctcggacatggtggtgggggaaggacgggtgggcaaggctggtgcgttccccagctctccctacgctgctcgggccattgcccagccagatgtggtcacctcagtccagctctggggcctccaggccatgtggctgttcccacggcccagtcctcgctgcagtaacccctgggggctctgaccacctatgggggccgggcaggagcctctggggcctccactccgacatcaggacctgagatgaccgctgtgtggcgctctctccctgggcagggtggatgccacaggcccctctggctcccaggtgctgcttctccacaggtgcggcctggcccggcctcctaaaggccacaccctccccacgcacttcccaggccagaatccaaacatcgggaaccctgttttcttctgggtgtgtctcacttagaaatcgtggttcttccccgagggtgcatgttgcaggagggagagggcagggaagactcacagcagagcaggagggggcctgtgcttctcggggtctgcaccccaggcacagcggtgtcaccccgcaggaccgcgggcctgccccaacccccagcattcccgggtgggcccagaccccatcaccaagactggccacccgctgcgtgtgtgtgcgcgcgcgtgtacgtgtggccccacatccgccgccttccacgctaggatgtaagaggtcgcctcctattgtacatttggggaaagccttgggtgtaaatcagtgtaaacttggaggagagatttttctatcatgtagagtaggtattttttatagattgaaggttgatcaattttttaatactttcaagagaaaactgtgtatacacatgaaatatatatatatatatatatatatatatgtataatatataaagactggcaccctgcctctctgtgcccaggcccagccctggtgacatggcaccactcagcagtgctgtcactgtaagcatggactcccaggagacagtgtgggaaacgctcctgctttaattccccgagaaacggctcttcctgcctggatgcaggagggcaggggccaccacagattaaagctgttactgcacacgca

SEQ ID NO: 566 - DNA, 3303 bp, Homo sapiens
gcccagcctctgacagacatcctgggcctgcctgctttcctggccactcccgccttttcctgcctggcgtcccgcaggcccagcacaggccagccctgtcctgagtgggccctgggccctgccgtcctgcaggagtgggagctgcccagggacggccaacgaggtgacggacagcgcgtacatgggctccgagagcacctacagtgagtgtgagaccttcacggacgaggacaccagcaccctggtgcaccctgagctgcaacctgaaggggacgcagacagtgccggcggctcggccgtgccctctgagtgcctggacgccatggaggagcccgaccatggtgccctgctgctgctcccaggcaggcctcacccccatggccagtctgtcatcacggtgatcgggggcgaggagcactttgaggactacggtgaaggcagtgaggcggagctgtccccagagaccctatgcaacgggcagctgggctgcagtgaccccgctttcctcacgcccagcactgaccctcttgccgcaaagctgcacagcatcctcactgatgaggcgtttgagttttactgtagccagtgccacaaacaaatcaaccgccttgaggatctttctgcccgcctgagtgatcttgaaatgaatagtccgacaaagcggctctccagcaagaaggtggcaaggtacctgcaccagtcaggggccctgaccatggaggccctggaggacccttcccccgagctcatggagggcccagaggaggacattgctgacaaggttgtcttcctggaaaggcgtgtgctggagctggaaaaggacacggcagccaccggtgagcaacacagccgcctgaggcaggagaacctgcagctggtgcacagagcaaacgccctggaggagcagctgaaggagcaggagctgagagcctgcgagatggtcctggaagagacccggcgtcagaaggagctcctgtgcaagatggagagggagaagagcattgagatcgagaacctgcagaccaggctacagcaactggacgaggagaacagtgaactccggtcctgcacgccctgtctgaaggccaacattgagcgtctggaggaggagaagcagaagctgttggatgagatagagtcgctgacgctgcggctcagtgaagagcaggagaacaagaggagaatgggggacaggctgagtcacgagaggcaccagttccagagggacaaggaggccacccaggagctgatcgaggacctccgaaagcagctggagcacctgcagctcctcaagctggaggccgagcagcggcggggccgcagcagcagcatgggcctgcaggagtaccacagccgcgcccgggagagcgagctggagcaggaggtccgcaggctgaagcaggacaaccgcaacctgaaggagcagaacgaggagctgaacgggcagatcattaccctcagcatccagggcgccaagagcctcttctccacagccttctctgagtccctggctgcagagatcagctccgtctcccgagatgagctcatggaggcgattcagaagcaggaggagatcaacttccgcctgcaggactacatcgacaggatcatcgtggccatcatggagaccaacccgtccatcctggaggtcaagtagaggcaggaaggtccagcctgagctggattcgggactccaacaccctggagtggttccgtcagaccatgaggagccaagaccagcaggtcccacagccgacagtgcccagagcatgcagggaaccctcgtgcagctgagctggggccgccaaagaccggggctgccaaaggggcagagggtggtggagaggagagggagaaagggaagtcccagggcccggggtccacagaggatgagggttgtggcagggccgtccatcagcgctgaccttccgggggcccagagcttcccagccctgagtcaagctggccatgaacgcgtacacttcagttcagcaggatgggctggagagcctctctgtgcagcggtgtggggtgagccctgctgtggcctccttgtggtggtccctcttcccacgtgcagccctgttgggaagaaaggaagaaaacaggtccctccaggggtgctgctgcctaagccacccacataagtacgctggtgccgtgtcacccatgttgagccgctcctgatggctgacgggctcccagaccctcacctcggacatggtggtgggggaaggacgggtgggcaaggctggtgcgttccccagctctccctacgctgctcgggccattgcccagccagatgtggtcacctcagtccagctctggggcctccaggccatgtggctgttcccacggcccagtcctcgctgcagtaacccctgggggctctgaccacctatgggggccgggcaggagcctctggggcctccactccgacatcaggacctgagatgaccgctgtgtggcgctctctccctgggcagggtggatgccacaggcccctctggctcccaggtgctgcttctccacaggtgcggcctggcccggcctcctaaaggccacaccctccccacgcacttcccaggccagaatccaaacatcgggaaccctgttttcttctgggtgtgtctcacttagaaatcgtggttcttccccgagggtgcatgttgcaggagggagagggcagggaagactcacagcagagcaggagggggcctgtgcttctcggggtctgcaccccaggcacagcggtgtcaccccgcaggaccgcgggcctgccccaacccccagcattcccgggtgggcccagaccccatcaccaagactggccacccgctgcgtgtgtgtgcgcgcgcgtgtacgtgtggccccacatccgccgccttccacgctaggatgtaagaggtcgcctcctattgtacatttggggaaagccttgggtgtaaatcagtgtaaacttggaggagagatttttctatcatgtagagtaggtattttttatagattgaaggttgatcaattttttaatactttcaagagaaaactgtgtatacacatgaaatatatatatatatatatatatatatatgtataatatataaagactggcaccctgcctctctgtgcccaggcccagccctggtgacatggcaccactcagcagtgctgtcactgtaagcatggactcccaggagacagtgtgggaaacgctcctgctttaattccccgagaaacggctcttcctgcctggatgcaggagggcaggggccaccacagattaaagctgttactgcacacgca

SEQ ID NO: 567 - DNA, 1978 bp, Homo sapiens
tagttctccgggtacctcaggcgcctcagcctccttagtctcctcatcctgcttcacaggctccgcggcctccggcctcctcggcccccgtcccccggcctcctcggcccccgtcccccgccatccgccgcccggatcctcgccgccctccctaggccgccccgccgccatgggcctgcgcccgccgcgccgccgggccgagggcagctgaggcgcggtgcgaagatgggcgaggacagagcagggcccgagcgccagccccagcagcccgggcgccccgcgcgcgcccgcccgcgccgccgaggggatgcccgcgcccgccgccgcgccctgagcgcctttgtctgccgcccgcgcccttccgcaccactagcctctcgggagcatggcgtcggccccgccggcctcgcccccgggctcggagccgccggggcccgacccggagccgggcgggccggacgggccgggggcggcacaactggctccgggccctgcggagctacgcctcggagcgcccgtcggcggccccgacccgcagtccccgggcctggatgagcctgcgcccggggccgctgcagatggcggggcgcgttggagcgccgggccggccccggggctggagggaggcccgcgagaccccgggccgtccgccccgccgccgcgctccggcccgcgggggcagcttgcgagccccgacgccccgggcccagggccgcgctccgaagcgccgcttccagaactcgacccgttgttctcctggactgaggagcccgaggagtgtggccccgcgagctgcccggagagcgcgcctttccgcttgcaggggtccagcagcagccaccgagcgcggggcgaggtcgacgtcttctctcccttccccgcgcccacggcgggcgagctggcgctggagcaaggtcccgggtccccgccgcagccctcggacctcagccagacccacccccttccgagcgagcccgtggggagtcaggaggacggcccccgcctccgagccgtgttcgatgccctggacggggatggggacggtttcgtccgcatcgaggacttcatccagtttgctacggtctacggggcagagcaggtgaaggacttaactaagtacttggatcccagtgggctcggcgtgatcagctttgaagacttctaccaagggatcacagccatcagaaacggagatcctgatggccagtgctacggtggtgtcgcttctgcccaagatgaggagcccctggcctgcccggacgagttcgatgacttcgtcacctatgaggccaacgaggtgacggacagcgcgtacatgggctccgagagcacctacagtgagtgtgagaccttcacggacgaggacaccagcaccctggtgcaccctgagctgcaacctgaaggggacgcagacagtgccggcggctcggccgtgccctctgagtgcctggacgccatggaggagcccgaccatggtgccctgctgctgctcccaggcaggcctcacccccatggccagtctgtcatcacggtgatcgggggcgaggagcactttgaggactacggtgaaggcagtgaggcggagctgtccccagagaccctatgcaacgggcagctgggctgcagtgaccccgctttcctcacgcccagcactgaccctcttgccgcaaagctgcacagcatcctcactgatgaggcgtttgagttttactgtagccagtgccacaaacaaatcaaccgccttgaggatctttctgcccgcctgagtgatcttgaaatgaatagtccgacaaagcggctctccagcaagaaggtggcaagcttcgtatagatctgttggcttcctgctgtgaaagatggcaacatacacttttatcttcctcccctgccagttcttaccgaaataaacatgcagggttaaggcccttcccagggagccactcagtgtggctgccgggtggcctctgctgccgtcaga

SEQ ID NO: 568 - DNA, 3129 bp, Homo sapiens
caggtgaaggacttaactaagtacttggatcccagtgggctcggcgtgatcagctttgaagacttctaccaagggatcacagccatcagaaacggagatcctgatggccagtgctacggtggtgtcgcttctgcccaagatgaggagcccctggcctgcccggacgagttcgatgacttcgtcacctatgaggcctcacccccatggccagtctgtcatcacggtgatcgggggcgaggagcactttgaggactacggtgaaggcagtgaggcggagctgtccccagagaccctatgcaacgggcagctgggctgcagtgaccccgctttcctcacgcccagcactgaccctcttgccgcaaagctgcacagcatcctcactgatgaggcgtttgagttttactgtagccagtgccacaaacaaatcaaccgccttgaggatctttctgcccgcctgagtgatcttgaaatgaatagtccgacaaagcggctctccagcaagaaggtggcaaggtacctgcaccagtcaggggccctgaccatggaggccctggaggacccttcccccgagctcatggagggcccagaggaggacattgctgacaaggttgtcttcctggaaaggcgtgtgctggagctggaaaaggacacggcagccaccggtgagcaacacagccgcctgaggcaggagaacctgcagctggtgcacagagcaaacgccctggaggagcagctgaaggagcaggagctgagagcctgcgagatggtcctggaagagacccggcgtcagaaggagctcctgtgcaagatggagagggagaagagcattgagatcgagaacctgcagaccaggctacagcaactggacgaggagaacagtgaactccggtcctgcacgccctgtctgaaggccaacattgagcgtctggaggaggagaagcagaagctgttggatgagatagagtcgctgacgctgcggctcagtgaagagcaggagaacaagaggagaatgggggacaggctgagtcacgagaggcaccagttccagagggacaaggaggccacccaggagctgatcgaggacctccgaaagcagctggagcacctgcagctcctcaagctggaggccgagcagcggcggggccgcagcagcagcatgggcctgcaggagtaccacagccgcgcccgggagagcgagctggagcaggaggtccgcaggctgaagcaggacaaccgcaacctgaaggagcagaacgaggagctgaacgggcagatcattaccctcagcatccagggcgccaagagcctcttctccacagccttctctgagtccctggctgcagagatcagctccgtctcccgagatgagctcatggaggcgattcagaagcaggaggagatcaacttccgcctgcaggactacatcgacaggatcatcgtggccatcatggagaccaacccgtccatcctggaggtcaagtagaggcaggaaggtccagcctgagctggattcgggactccaacaccctggagtggttccgtcagaccatgaggagccaagaccagcaggtcccacagccgacagtgcccagagcatgcagggaaccctcgtgcagctgagctggggccgccaaagaccggggctgccaaaggggcagagggtggtggagaggagagggagaaagggaagtcccagggcccggggtccacagaggatgagggttgtggcagggccgtccatcagcgctgaccttccgggggcccagagcttcccagccctgagtcaagctggccatgaacgcgtacacttcagttcagcaggatgggctggagagcctctctgtgcagcggtgtggggtgagccctgctgtggcctccttgtggtggtccctcttcccacgtgcagccctgttgggaagaaaggaagaaaacaggtccctccaggggtgctgctgcctaagccacccacataagtacgctggtgccgtgtcacccatgttgagccgctcctgatggctgacgggctcccagaccctcacctcggacatggtggtgggggaaggacgggtgggcaaggctggtgcgttccccagctctccctacgctgctcgggccattgcccagccagatgtggtcacctcagtccagctctggggcctccaggccatgtggctgttcccacggcccagtcctcgctgcagtaacccctgggggctctgaccacctatgggggccgggcaggagcctctggggcctccactccgacatcaggacctgagatgaccgctgtgtggcgctctctccctgggcagggtggatgccacaggcccctctggctcccaggtgctgcttctccacaggtgcggcctggcccggcctcctaaaggccacaccctccccacgcacttcccaggccagaatccaaacatcgggaaccctgttttcttctgggtgtgtctcacttagaaatcgtggttcttccccgagggtgcatgttgcaggagggagagggcagggaagactcacagcagagcaggagggggcctgtgcttctcggggtctgcaccccaggcacagcggtgtcaccccgcaggaccgcgggcctgccccaacccccagcattcccgggtgggcccagaccccatcaccaagactggccacccgctgcgtgtgtgtgcgcgcgcgtgtacgtgtggccccacatccgccgccttccacgctaggatgtaagaggtcgcctcctattgtacatttggggaaagccttgggtgtaaatcagtgtaaacttggaggagagatttttctatcatgtagagtaggtattttttatagattgaaggttgatcaattttttaatactttcaagagaaaactgtgtatacacatgaaatatatatatatatatatatatatatatgtataatatataaagactggcaccctgcctctctgtgcccaggcccagccctggtgacatggcaccactcagcagtgctgtcactgtaagcatggactcccaggagacagtgtgggaaacgctcctgctttaattccccgagaaacggctcttcctgcctggatgcaggagggcaggggccaccacagattaaagctgttactgcacacgca

SEQ ID NO: 569 - DNA, 1843 bp, Homo sapiens
tagttctccgggtacctcaggcgcctcagcctccttagtctcctcatcctgcttcacaggctccgcggcctccggcctcctcggcccccgtcccccggcctcctcggcccccgtcccccgccatccgccgcccggatcctcgccgccctccctaggccgccccgccgccatgggcctgcgcccgccgcgccgccgggccgagggcagctgaggcgcggtgcgaagatgggcgaggacagagcagggcccgagcgccagccccagcagcccgggcgccccgcgcgcgcccgcccgcgccgccgaggggatgcccgcgcccgccgccgcgccctgagcgcctttgtctgccgcccgcgcccttccgcaccactagcctctcgggagcatggcgtcggccccgccggcctcgcccccgggctcggagccgccggggcccgacccggagccgggcgggccggacgggccgggggcggcacaactggctccgggccctgcggagctacgcctcggagcgcccgtcggcggccccgacccgcagtccccgggcctggatgagcctgcgcccggggccgctgcagatggcggggcgcgttggagcgccgggccggccccggggctggagggaggcccgcgagaccccgggccgtccgccccgccgccgcgctccggcccgcgggggcagcttgcgagccccgacgccccgggcccagggccgcgctccgaagcgccgcttccagaactcgacccgttgttctcctggactgaggagcccgaggagtgtggccccgcgagctgcccggagagcgcgcctttccgcttgcaggggtccagcagcagccaccgagcgcggggcgaggtcgacgtcttctctcccttccccgcgcccacggcgggcgagctggcgctggagcaaggtcccgggtccccgccgcagccctcggacctcagccagacccacccccttccgagcgagcccgtggggagtcaggaggacggcccccgcctccgagccgtgttcgatgccctggacggggatggggacggtttcgtccgcatcgaggacttcatccagtttgctacggtctacggggcagagcaggtgaaggacttaactaagtacttggatcccagtgggctcggcgtgatcagctttgaagacttctaccaagggatcacagccatcagaaacggagatcctgatggccagtgctacggtggtgtcgcttctgcccaagatgaggagcccctggcctgcccggacgagttcgatgacttcgtcacctatgaggccaacgaggtgacggacagcgcgtacatgggctccgagagcacctacagtgagtgtgagaccttcacggacgaggacaccagcaccctggtgcaccctgagctgcaacctgaaggggacgcagacagtgccggcggctcggccgtgccctctgagtgcctggacgccatggaggagcccgaccatggtgccctgctgctgctcccaggcaggcctcacccccatggccagtctgtcatcacggtgatcgggggcgaggagcactttgaggactacggtgaaggcagtgaggcggagctgtccccagagaccctatgcaacgggcagctgggctgcagtgaccccgctttcctcacgcccagtccgacaaagcggctctccagcaagaaggtggcaagcttcgtatagatctgttggcttcctgctgtgaaagatggcaacatacacttttatcttcctcccctgccagttcttaccgaaataaacatgcagggttaaggcccttcccagggagccactcagtgtggctgccgggtggcctctgctgccgtcaga

SEQ ID NO: 570 - DNA, 2729 bp, Homo sapiens
ttagttctccgggtacctcaggcgcctcagcctccttagtctcctcatcctgcttcacaggctccgcggcctccggcctcctcggcccccgtcccccggcctcctcggcccccgtcccccgccatccgccgcccggatcctcgccgccctccctaggccgccccgccgccatgggcctgcgcccgccgcgccgccgggccgagggcagctgaggcgcggtgcgaagatgggcgaggacagagcagggcccgagcgccagccccagcagcccgggcgccccgcgcgcgcccgcccgcgccgccgaggggatgcccgcgcccgccgccgcgccctgagcgcctttgtctgccgcccgcgcccttccgcaccactagcctctcgggagcatggcgtcggccccgccggcctcgcccccgggctcggagccgccggggcccgacccggagccgggcgggccggacgggccgggggcggcacaactggctccgggccctgcggagctacgcctcggagcgcccgtcggcggccccgacccgcagtccccgggcctggatgagcctgcgcccggggccgctgcagatggcggggcgcgttggagcgccgggccggccccggggctggagggaggcccgcgagaccccgggccgtccgccccgccgccgcgctccggcccgcgggggcagcttgcgagccccgacgccccgggcccagggccgcgctccgaagcgccgcttccagaactcgacccgttgttctcctggactgaggagcccgaggagtgtggccccgcgagctgcccggagagcgcgcctttccgcttgcaggggtccagcagcagccaccgagcgcggggcgaggtcgacgtcttctctcccttccccgcgcccacggcgggcgagctggcgctggagcaaggtcccgggtccccgccgcagccctcggacctcagccagacccacccccttccgagcgagcccgtggggagtcaggaggacggcccccgcctccgagccgtgttcgatgccctggacggggatggggacggtttcgtccgcatcgaggacttcatccagtttgctacggtctacggggcagagcaggtgaaggacttaactaagtacttggatcccagtgggctcggcgtgatcagctttgaagacttctaccaagggatcacagccatcagaaacggagatcctgatggccagtgctacggtggtgtcgcttctgcccaagatgaggagcccctggcctgcccggacgagttcgatgacttcgtcacctatgaggtccacgattatagtgtcacagagtcgattcagtgccggctcatccctcacaccagcccccacaaccaccgatcctccgtgtctccacagctctgcctcttccagaacgccacggagctagaaccatctggcatgcagccttttcagatgcgcctctttcccttagtgaatacgcagttacctctcctccatgtcttgctttgctttttaagggtgggatgtaattttccacaaagtggagttcgatactgtgaaacttatggaaaatttgctcttttaaaaaacagcttgcacatcatgtcatcttaaaaaaaaaaagtctaataaagatatgagtagggagtatgtgttccatccagataccctattcggggaccctccactggtagtcttcaggtaaataaacctttgattgattggttgattggttgattgattgatattctgaatggttccagtcagacccatttctctttactgggagcatcgcagtgctcacaccggggtggtcgggtaaaatgtgcagttagtcatggccgagctagtgggtctgctggctcgcactgttttcccagggatcctttcagcaggcagcttataacgggaaagttgctgctatggtgtctgagtaagtggggagagtagaaggggatggactgtggcgccgctgagttcctgggcatggtgatgtctgaggatctgagcaggtggagcccagggggtggtggggctgtttgtcgggtttctggaagagcgaagggaaagtcagggagtgtaaggcgcatctcacagaatcgtcgggccgcgctctctcccgtcctccctccttctcccactactggcgatgtctggagcaaagagctgccttagtgaaatgatagtgaaatgtgtcttttgtgcaaaccattatcagcttaggaagccaaaaacaaaagccactctgttttcagccctgactgactaaccgttttttaaaccagcaaggacacttcctgaactttgccttcccctccctgggcaacaccagcaggaggtttattagagcgtgtctgggagcaggttaaactttctcctaggtggtgatgtgcctccaggtgagcgcacaggctttgcagaaaccccagcatgacaagcaagtaggaaggtgacattgttgtttgagaaaagccagtgacccggttgggacggagacacgatggggagccggtctccaacagcatgcccttcctgaaggtgtgtacagagccaggcccagcctgtgaggccacccgggccagcatctgagggcccagcctctgacagacatcctgggcctgcctgctttcctggccactcccgccttttcctgcctggcgtcccgcaggcccagcacaggccagccctgtcctgagtgggccctgggccctgccgtcctgcaggagtgggagctgcccagggacg

SEQ ID NO: 571 - DNA, 3661 bp, Homo sapiens
tcaggaggcggagatcgctgcttctcacctactttctgaacttggcctccgcagtcgcgacctggcgtgaaggaggagctgccgcccccgccccagcctcggggacgcctctctgaagagaagccatttgaagcagaatccaaaccatgaattgtagagaattacccttgaccctttgggtgcttatatctgtaagcactgcagaatcttgtacttcacgtccccacattactgtggttgaaggggaacctttctatctgaaacattgctcgtgttcacttgcacatgagattgaaacaaccaccaaaagctggtacaaaagcagtggatcacaggaacatgtggagctgaacccaaggagttcctcgagaattgctttgcatgattgtgttttggagttttggccagttgagttgaatgacacaggatcttactttttccaaatgaaaaattatactcagaaatggaaattaaatgtcatcagaagaaataaacacagctgtttcactgaaagacaagtaactagtaaaattgtggaagttaaaaaattttttcagataacctgtgaaaacagttactatcaaacactggtcaacagcacatcattgtataagaactgtaaaaagctactactggagaacaataaaaacccaacgataaagaagaacgccgagtttgaagatcaggggtattactcctgcgtgcatttccttcatcataatggaaaactatttaatatcaccaaaaccttcaatataacaatagtggaagatcgcagtaatatagttccggttcttcttggaccaaagcttaaccatgttgcagtggaattaggaaaaaacgtaaggctcaactgctctgctttgctgaatgaagaggatgtaatttattggatgttcggggaagaaaatggatcggatcctaatatacatgaagagaaagaaatgagaattatgactccagaaggcaaatggcatgcttcaaaagtattgagaattgaaaatattggtgaaagcaatctaaatgttttatataattgcactgtggccagcacgggaggcacagacaccaaaagcttcatcttggtgagaaaagcagacatggctgatatcccaggccacgtcttcacaagaggaatgatcatagctgttttgatcttggtggcagtagtgtgcctagtgactgtgtgtgtcatttatagagttgacttggttctattttatagacatttaacgagaagagatgaaacattaacagatggaaaaacatatgatgcttttgtgtcttacctaaaagaatgccgacctgaaaatggagaggagcacacctttgctgtggagattttgcccagggtgttggagaaacattttgggtataagttatgcatatttgaaagggatgtagtgcctggaggagctgttgttgatgaaatccactcactgatagagaaaagccgaagactaatcattgtcctaagtaaaagttatatgtctaatgaggtcaggtatgaacttgaaagtggactccatgaagcattggtggaaagaaaaattaaaataatcttaattgaatttacacctgttactgacttcacattcttgccccaatcactaaagcttttgaaatctcacagagttctgaagtggaaggccgataaatctctttcttataactcaaggttctggaagaaccttctttacttaatgcctgcaaaaacagtcaagccaggtagagacgaaccggaagtcttgcctgttctttccgagtcttaatcttcagaaacagtgaacgccaaaaagaactcaagatattctggggactgagcatatgaacctgttcataacaaaggctgtgactcgaaataattaactttgtcaaaatcctgctcacaatttgaagatgaaacttgtcattaggttggcgggaatgagactaaagattgcgctgtgggctgtggtcacgtgctcccagaagacctggaattcaaaagaaatggagctattctttttctccctctttcataactggatgcagctgctcatactcaatcccatattcagcaagtgtgaagctggacgtgatgcaaaataaccgatgccctacaaaaagggcgcatctttaagagttttaatgccagtgcttaattcgaatgaggggattttaagtgtctgaagaggcattttctagggaccagtgggtgactgagtaactgaaatgctgctttcactccctaacaccatggatctggttgtgcataggatgtgggaggaggggctggcagggccgccttcagaggctgcagggcctcagcctcaggatgcatttaatgtatcctggccacagttgcagccaacggttcttgaaagctcggtaaggccctgcaacgcagagcctgcttatgtggatctatttatgggaacttcttaaaaggaccccagaatagctctttatctttcacaagagacacaaattctaattgagttaattatctgggcctttcactttggatgctctgaaacatttgttgattttgtgtgaatgtttatatcaaaatgtttgccaggttgtattagccattgaatagcaaaaaactgatagttacttgcttgttttttaaaaattacatattaaaaatgcccttggcataaggcagcatggtgtggcagttaagagatgggctgtgcagcccatcctgagctccagtcctgagtttgctacttacttctgtggcctctggaaccttatccaacctcttggtgcttcagtttcctcatctgtgaaattagaatttataataattgcacctacctcccaggggtaactaaatgaataaatataataaagtacttacagtggttcctgacacagactcagcactccgtcagtgttgccatgactatttttattatcattattaatgattacttagatcaattatttagcagtggactaatggaagctacagagcagggaagggaagcagatctagggaggaaggcagttttgatttgaggaggtttgcacatgtagagaagcatactggagaagcatatccagagggcgaaagatatctctccattgtgcatctgcctcttttgacgttggaagacacatgtcttactccccaaagggagcccagcactgggagccttcttgatgatctcaaaaataatagctattcaagaaaatcaccaagtgactgtgaaaccgtcagttcggaaggctggttagaacatgtgggagcaacatgaatgttctacaaaagtttaaagcagagattgtttcaaatgggtgtagtagatattactgaaaaccaaaaaagagtgagattgtcagtgtaagaatgtgatttaatgtttgtagtgcttacaattttgtgtaccaactggatgactaaaaagagtaaaataatttaattaatagctcatattttatgtgtgaaaacatgttagtgaacatatataatcaaaatagatttcattgctattgcatagtctctaatacatagaatgattttgcttttctcttttattatacttgctttaaaatacttgaaatatattttgcattaaatgcatttcaagttaaatgtcttaaatgtatacattagatgtgtgttttaaaatgcataaaacacgttgaaatacattaatgaaccatt

SEQ ID NO: 572 - DNA, 3471 bp, Homo sapiens
tcaggaggcggagatcgctgcttctcacctactttctgaacttggcctccgcagtcgcgacctggcgtgaaggaggagctgccgcccccgccccagcctcggggacgcctctctgaagagaagccatttgaagcagaatccaaaccatgaattgtagagaattacccttgaccctttgggtgcttatatctgtaagcactgcagaaattatactcagaaatggaaattaaatgtcatcagaagaaataaacacagctgtttcactgaaagacaagtaactagtaaaattgtggaagttaaaaaattttttcagataacctgtgaaaacagttactatcaaacactggtcaacagcacatcattgtataagataggaccacctatttgcaggaaaacaagctcagggctccactgattctacattatgaactgtaaaaagctactactggagaacaataaaaacccaacgataaagaagaacgccgagtttgaagatcaggggtattactcctgcgtgcatttccttcatcataatggaaaactatttaatatcaccaaaaccttcaatataacaatagtggaagatcgcagtaatatagttccggttcttcttggaccaaagcttaaccatgttgcagtggaattaggaaaaaacgtaaggctcaactgctctgctttgctgaatgaagaggatgtaatttattggatgttcggggaagaaaatggatcggatcctaatatacatgaagagaaagaaatgagaattatgactccagaaggcaaatggcatgcttcaaaagtattgagaattgaaaatattggtgaaagcaatctaaatgttttatataattgcactgtggccagcacgggaggcacagacaccaaaagcttcatcttggtgagaaaagacatggctgatatcccaggccacgtcttcacaagaggaatgatcatagctgttttgatcttggtggcagtagtgtgcctagtgactgtgtgtgtcatttatagagttgacttggttctattttatagacatttaacgagaagagatgaaacattaacagatggaaaaacatatgatgcttttgtgtcttacctaaaagaatgccgacctgaaaatggagaggagcacacctttgctgtggagattttgcccagggtgttggagaaacattttgggtataagttatgcatatttgaaagggatgtagtgcctggaggagctgttgttgatgaaatccactcactgatagagaaaagccgaagactaatcattgtcctaagtaaaagttatatgtctaatgaggtcaggtatgaacttgaaagtggactccatgaagcattggtggaaagaaaaattaaaataatcttaattgaatttacacctgttactgacttcacattcttgccccaatcactaaagcttttgaaatctcacagagttctgaagtggaaggccgataaatctctttcttataactcaaggttctggaagaaccttctttacttaatgcctgcaaaaacagtcaagccaggtagagacgaaccggaagtcttgcctgttctttccgagtcttaatcttcagaaacagtgaacgccaaaaagaactcaagatattctggggactgagcatatgaacctgttcataacaaaggctgtgactcgaaataattaactttgtcaaaatcctgctcacaatttgaagatgaaacttgtcattaggttggcgggaatgagactaaagattgcgctgtgggctgtggtcacgtgctcccagaagacctggaattcaaaagaaatggagctattctttttctccctctttcataactggatgcagctgctcatactcaatcccatattcagcaagtgtgaagctggacgtgatgcaaaataaccgatgccctacaaaaagggcgcatctttaagagttttaatgccagtgcttaattcgaatgaggggattttaagtgtctgaagaggcattttctagggaccagtgggtgactgagtaactgaaatgctgctttcactccctaacaccatggatctggttgtgcataggatgtgggaggaggggctggcagggccgccttcagaggctgcagggcctcagcctcaggatgcatttaatgtatcctggccacagttgcagccaacggttcttgaaagctcggtaaggccctgcaacgcagagcctgcttatgtggatctatttatgggaacttcttaaaaggaccccagaatagctctttatctttcacaagagacacaaattctaattgagttaattatctgggcctttcactttggatgctctgaaacatttgttgattttgtgtgaatgtttatatcaaaatgtttgccaggttgtattagccattgaatagcaaaaaactgatagttacttgcttgttttttaaaaattacatattaaaaatgcccttggcataaggcagcatggtgtggcagttaagagatgggctgtgcagcccatcctgagctccagtcctgagtttgctacttacttctgtggcctctggaaccttatccaacctcttggtgcttcagtttcctcatctgtgaaattagaatttataataattgcacctacctcccaggggtaactaaatgaataaatataataaagtacttacagtggttcctgacacagactcagcactccgtcagtgttgccatgactatttttattatcattattaatgattacttagatcaattatttagcagtggactaatggaagctacagagcagggaagggaagcagatctagggaggaaggcagttttgatttgaggaggtttgcacatgtagagaagcatactggagaagcatatccagagggcgaaagatatctctccattgtgcatctgcctcttttgacgttggaagacacatgtcttactccccaaagggagcccagcactgggagccttcttgatgatctcaaaaataatagctattcaagaaaatcaccaagtgactgtgaaaccgtcagttcggaaggctggttagaacatgtgggagcaacatgaatgttctacaaaagtttaaagcagagattgtttcaaatgggtgtagtagatattactgaaaaccaaaaaagagtgagattgtcagtgtaagaatgtgatttaatgtttgtagtgcttacaattttgtgtaccaactggatgactaaaaagagtaaaataatttaattaatagctcatattttatgtgtgaaaacatgttagtgaacatatataatcaaaatagatttcattgctattgcatagtctctaatacatagaatgattttgcttttctcttttattatacttgctttaaaatacttgaaatatattttgcattaaatgcatttcaagttaaatgtcttaaatgtatacattagatgtgtgttttaaaatgcataaaacacgttgaaatacattaatgaaccatt

SEQ ID NO: 573 - DNA, 3542 bp, Homo sapiens
agaagccatttgaagcagaatccaaaccatgaattgtagagaattacccttgaccctttgggtgcttatatctgtaagcactgcagaatcttgtacttcacgtccccacattactgtggttgaaggggaacctttctatctgaaacattgctcgtgttcacttgcacatgagattgaaacaaccaccaaaagctggtacaaaagcagtggatcacaggaacatgtggagctgaacccaaggagttcctcgagaattgctttgcatgattgtgttttggagttttggccagttgagttgaatgacacaggatcttactttttccaaatgaaaaattatactcagaaatggaaattaaatgtcatcagaagaaataaacacagctgtttcactgaaagacaagtaactagtaaaattgtggaagttaaaaaattttttcagataacctgtgaaaacagttactatcaaacactggtcaacagcacatcattgtataagaactgtaaaaagctactactggagaacaataaaaacccaacgataaagaagaacgccgagtttgaagatcaggggtattactcctgcgtgcatttccttcatcataatggaaaactatttaatatcaccaaaaccttcaatataacaatagtggaagatcgcagtaatatagttccggttcttcttggaccaaagcttaaccatgttgcagtggaattaggaaaaaacgtaaggctcaactgctctgctttgctgaatgaagaggatgtaatttattggatgttcggggaagaaaatggatcggatcctaatatacatgaagagaaagaaatgagaattatgactccagaaggcaaatggcatgcttcaaaagtattgagaattgaaaatattggtgaaagcaatctaaatgttttatataattgcactgtggccagcacgggaggcacagacaccaaaagcttcatcttggtgagaaaagacatggctgatatcccaggccacgtcttcacaagaggaatgatcatagctgttttgatcttggtggcagtagtgtgcctagtgactgtgtgtgtcatttatagagttgacttggttctattttatagacatttaacgagaagagatgaaacattaacagatggaaaaacatatgatgcttttgtgtcttacctaaaagaatgccgacctgaaaatggagaggagcacacctttgctgtggagattttgcccagggtgttggagaaacattttgggtataagttatgcatatttgaaagggatgtagtgcctggaggagctgttgttgatgaaatccactcactgatagagaaaagccgaagactaatcattgtcctaagtaaaagttatatgtctaatgaggtcaggtatgaacttgaaagtggactccatgaagcattggtggaaagaaaaattaaaataatcttaattgaatttacacctgttactgacttcacattcttgccccaatcactaaagcttttgaaatctcacagagttctgaagtggaaggccgataaatctctttcttataactcaaggttctggaagaaccttctttacttaatgcctgcaaaaacagtcaagccaggtagagacgaaccggaagtcttgcctgttctttccgagtcttaatcttcagaaacagtgaacgccaaaaagaactcaagatattctggggactgagcatatgaacctgttcataacaaaggctgtgactcgaaataattaactttgtcaaaatcctgctcacaatttgaagatgaaacttgtcattaggttggcgggaatgagactaaagattgcgctgtgggctgtggtcacgtgctcccagaagacctggaattcaaaagaaatggagctattctttttctccctctttcataactggatgcagctgctcatactcaatcccatattcagcaagtgtgaagctggacgtgatgcaaaataaccgatgccctacaaaaagggcgcatctttaagagttttaatgccagtgcttaattcgaatgaggggattttaagtgtctgaagaggcattttctagggaccagtgggtgactgagtaactgaaatgctgctttcactccctaacaccatggatctggttgtgcataggatgtgggaggaggggctggcagggccgccttcagaggctgcagggcctcagcctcaggatgcatttaatgtatcctggccacagttgcagccaacggttcttgaaagctcggtaaggccctgcaacgcagagcctgcttatgtggatctatttatgggaacttcttaaaaggaccccagaatagctctttatctttcacaagagacacaaattctaattgagttaattatctgggcctttcactttggatgctctgaaacatttgttgattttgtgtgaatgtttatatcaaaatgtttgccaggttgtattagccattgaatagcaaaaaactgatagttacttgcttgttttttaaaaattacatattaaaaatgcccttggcataaggcagcatggtgtggcagttaagagatgggctgtgcagcccatcctgagctccagtcctgagtttgctacttacttctgtggcctctggaaccttatccaacctcttggtgcttcagtttcctcatctgtgaaattagaatttataataattgcacctacctcccaggggtaactaaatgaataaatataataaagtacttacagtggttcctgacacagactcagcactccgtcagtgttgccatgactatttttattatcattattaatgattacttagatcaattatttagcagtggactaatggaagctacagagcagggaagggaagcagatctagggaggaaggcagttttgatttgaggaggtttgcacatgtagagaagcatactggagaagcatatccagagggcgaaagatatctctccattgtgcatctgcctcttttgacgttggaagacacatgtcttaccccccaaagggagcccagcactgggagccttcttgatgatctcaaaaataatagctattcaagaaaatcaccaagtgactgtgaaaccgtcagttcggaaggctggttagaacatgtgggagcaacatgaatgttctacaaaagtttaaagcagagattgtttcaaatgggtgtagtagatattactgaaaaccaaaaaagagtgagattgtcagtgtaagaatgtgatttaatgtttgtagtgcttacaattttgtgtaccaactggatgactaaaaagagtaaaataatttaattaatagctcatattttatgtgtgaaaacatgttagtgaacatatataatcaaaatagatttcattgctattgcatagtctctaatacatagaatgattttgcttttctcttttattatacttgctttaaaatacttgaaatatattttgcattaaatgcatttcaagttaaatgtcttaaatgtatacattagatgtgtgttttaaaatgcataaaacacgttgaaatacattaatgaaccattag

SEQ ID NO: 574 - DNA, 3386 bp, Homo sapiens
agaagccatttgaagcagaatccaaaccatgaattgtagagaattacccttgaccctttgggtgcttatatctgtaagcactgcagaatcttgtacttcacgtccccacattactgtggttgaaggggaacctttctatctgaaacattgctcgtgttcacttgcacatgagattgaaacaaccaccaaaagctggtacaaaagcagtggatcacaggaacatgtggagctgaacccaaggagttcctcgagaattgctttgcatgattgtgttttggagttttggccagttgagttgaatgacacaggatcttactttttccaaatgaaaaattatactcagaaatggaaattaaatgtcatcagaagaaataaacacagctgtttcactgaaagacaagtaactagtaaaattgtggaagttaaaaaattttttcagataacctgtgaaaacagttactatcaaacactggtcaacagcacatcattgtataagaactgtaaaaagctactactggagaacaataaaaacccaacgataaagaagaacgccgagtttgaagatcaggggtattactcctgcgtgcatttccttcatcataatggaaaactatttaatatcaccaaaaccttcaatataacaatagtggaagatcgcagtaatatagttccggttcttcttggaccaaagcttaaccatgttgcagtggaattaggaaaaaacgtaaggctcaactgctctgctttgctgaatgaagaggatgtaatttattggatgttcggggaagaaaatggatcggatcctaatatacatgaagagaaagaaatgagaattatgactccagaaggcaaatggcatgcttcaaaagtattgagaattgaaaatattggtgaaagcaatctaaatgttttatataattgcactgtggccagcacgggaggcacagacaccaaaagcttcatcttggtgagaaaagcagacatggctgatatcccaggccacgtcttcacaagaggaatgatcatagctgttttgatcttggtggcagtagtgtgcctagtgactgtgtgtgtcatttatagagttgacttggttctattttatagacatttaacgagaagagatgaaacattaacagctgttgttgatgaaatccactcactgatagagaaaagccgaagactaatcattgtcctaagtaaaagttatatgtctaatgaggtcaggtatgaacttgaaagtggactccatgaagcattggtggaaagaaaaattaaaataatcttaattgaatttacacctgttactgacttcacattcttgccccaatcactaaagcttttgaaatctcacagagttctgaagtggaaggccgataaatctctttcttataactcaaggttctggaagaaccttctttacttaatgcctgcaaaaacagtcaagccaggtagagacgaaccggaagtcttgcctgttctttccgagtcttaatcttcagaaacagtgaacgccaaaaagaactcaagatattctggggactgagcatatgaacctgttcataacaaaggctgtgactcgaaataattaactttgtcaaaatcctgctcacaatttgaagatgaaacttgtcattaggttggcgggaatgagactaaagattgcgctgtgggctgtggtcacgtgctcccagaagacctggaattcaaaagaaatggagctattctttttctccctctttcataactggatgcagctgctcatactcaatcccatattcagcaagtgtgaagctggacgtgatgcaaaataaccgatgccctacaaaaagggcgcatctttaagagttttaatgccagtgcttaattcgaatgaggggattttaagtgtctgaagaggcattttctagggaccagtgggtgactgagtaactgaaatgctgctttcactccctaacaccatggatctggttgtgcataggatgtgggaggaggggctggcagggccgccttcagaggctgcagggcctcagcctcaggatgcatttaatgtatcctggccacagttgcagccaacggttcttgaaagctcggtaaggccctgcaacgcagagcctgcttatgtggatctatttatgggaacttcttaaaaggaccccagaatagctctttatctttcacaagagacacaaattctaattgagttaattatctgggcctttcactttggatgctctgaaacatttgttgattttgtgtgaatgtttatatcaaaatgtttgccaggttgtattagccattgaatagcaaaaaactgatagttacttgcttgttttttaaaaattacatattaaaaatgcccttggcataaggcagcatggtgtggcagttaagagatgggctgtgcagcccatcctgagctccagtcctgagtttgctacttacttctgtggcctctggaaccttatccaacctcttggtgcttcagtttcctcatctgtgaaattagaatttataataattgcacctacctcccaggggtaactaaatgaataaatataataaagtacttacagtggttcctgacacagactcagcactccgtcagtgttgccatgactatttttattatcattattaatgattacttagatcaattatttagcagtggactaatggaagctacagagcagggaagggaagcagatctagggaggaaggcagttttgatttgaggaggtttgcacatgtagagaagcatactggagaagcatatccagagggcgaaagatatctctccattgtgcatctgcctcttttgacgttggaagacacatgtcttaccccccaaagggagcccagcactgggagccttcttgatgatctcaaaaataatagctattcaagaaaatcaccaagtgactgtgaaaccgtcagttcggaaggctggttagaacatgtgggagcaacatgaatgttctacaaaagtttaaagcagagattgtttcaaatgggtgtagtagatattactgaaaaccaaaaaagagtgagattgtcagtgtaagaatgtgatttaatgtttgtagtgcttacaattttgtgtaccaactggatgactaaaaagagtaaaataatttaattaatagctcatattttatgtgtgaaaacatgttagtgaacatatataatcaaaatagatttcattgctattgcatagtctctaatacatagaatgattttgcttttctcttttattatacttgctttaaaatacttgaaatatattttgcattaaatgcatttcaagttaaatgtcttaaatgtatacattagatgtgtgttttaaaatgcataaaacacgttgaaatacattaatgaaccattag

SEQ ID NO: 575 - DNA, 3383 bp, Homo sapiens
agaagccatttgaagcagaatccaaaccatgaattgtagagaattacccttgaccctttgggtgcttatatctgtaagcactgcagaatcttgtacttcacgtccccacattactgtggttgaaggggaacctttctatctgaaacattgctcgtgttcacttgcacatgagattgaaacaaccaccaaaagctggtacaaaagcagtggatcacaggaacatgtggagctgaacccaaggagttcctcgagaattgctttgcatgattgtgttttggagttttggccagttgagttgaatgacacaggatcttactttttccaaatgaaaaattatactcagaaatggaaattaaatgtcatcagaagaaataaacacagctgtttcactgaaagacaagtaactagtaaaattgtggaagttaaaaaattttttcagataacctgtgaaaacagttactatcaaacactggtcaacagcacatcattgtataagaactgtaaaaagctactactggagaacaataaaaacccaacgataaagaagaacgccgagtttgaagatcaggggtattactcctgcgtgcatttccttcatcataatggaaaactatttaatatcaccaaaaccttcaatataacaatagtggaagatcgcagtaatatagttccggttcttcttggaccaaagcttaaccatgttgcagtggaattaggaaaaaacgtaaggctcaactgctctgctttgctgaatgaagaggatgtaatttattggatgttcggggaagaaaatggatcggatcctaatatacatgaagagaaagaaatgagaattatgactccagaaggcaaatggcatgcttcaaaagtattgagaattgaaaatattggtgaaagcaatctaaatgttttatataattgcactgtggccagcacgggaggcacagacaccaaaagcttcatcttggtgagaaaagatggaaaaacatatgatgcttttgtgtcttacctaaaagaatgccgacctgaaaatggagaggagcacacctttgctgtggagattttgcccagggtgttggagaaacattttgggtataagttatgcatatttgaaagggatgtagtgcctggaggagctgttgttgatgaaatccactcactgatagagaaaagccgaagactaatcattgtcctaagtaaaagttatatgtctaatgaggtcaggtatgaacttgaaagtggactccatgaagcattggtggaaagaaaaattaaaataatcttaattgaatttacacctgttactgacttcacattcttgccccaatcactaaagcttttgaaatctcacagagttctgaagtggaaggccgataaatctctttcttataactcaaggttctggaagaaccttctttacttaatgcctgcaaaaacagtcaagccaggtagagacgaaccggaagtcttgcctgttctttccgagtcttaatcttcagaaacagtgaacgccaaaaagaactcaagatattctggggactgagcatatgaacctgttcataacaaaggctgtgactcgaaataattaactttgtcaaaatcctgctcacaatttgaagatgaaacttgtcattaggttggcgggaatgagactaaagattgcgctgtgggctgtggtcacgtgctcccagaagacctggaattcaaaagaaatggagctattctttttctccctctttcataactggatgcagctgctcatactcaatcccatattcagcaagtgtgaagctggacgtgatgcaaaataaccgatgccctacaaaaagggcgcatctttaagagttttaatgccagtgcttaattcgaatgaggggattttaagtgtctgaagaggcattttctagggaccagtgggtgactgagtaactgaaatgctgctttcactccctaacaccatggatctggttgtgcataggatgtgggaggaggggctggcagggccgccttcagaggctgcagggcctcagcctcaggatgcatttaatgtatcctggccacagttgcagccaacggttcttgaaagctcggtaaggccctgcaacgcagagcctgcttatgtggatctatttatgggaacttcttaaaaggaccccagaatagctctttatctttcacaagagacacaaattctaattgagttaattatctgggcctttcactttggatgctctgaaacatttgttgattttgtgtgaatgtttatatcaaaatgtttgccaggttgtattagccattgaatagcaaaaaactgatagttacttgcttgttttttaaaaattacatattaaaaatgcccttggcataaggcagcatggtgtggcagttaagagatgggctgtgcagcccatcctgagctccagtcctgagtttgctacttacttctgtggcctctggaaccttatccaacctcttggtgcttcagtttcctcatctgtgaaattagaatttataataattgcacctacctcccaggggtaactaaatgaataaatataataaagtacttacagtggttcctgacacagactcagcactccgtcagtgttgccatgactatttttattatcattattaatgattacttagatcaattatttagcagtggactaatggaagctacagagcagggaagggaagcagatctagggaggaaggcagttttgatttgaggaggtttgcacatgtagagaagcatactggagaagcatatccagagggcgaaagatatctctccattgtgcatctgcctcttttgacgttggaagacacatgtcttaccccccaaagggagcccagcactgggagccttcttgatgatctcaaaaataatagctattcaagaaaatcaccaagtgactgtgaaaccgtcagttcggaaggctggttagaacatgtgggagcaacatgaatgttctacaaaagtttaaagcagagattgtttcaaatgggtgtagtagatattactgaaaaccaaaaaagagtgagattgtcagtgtaagaatgtgatttaatgtttgtagtgcttacaattttgtgtaccaactggatgactaaaaagagtaaaataatttaattaatagctcatattttatgtgtgaaaacatgttagtgaacatatataatcaaaatagatttcattgctattgcatagtctctaatacatagaatgattttgcttttctcttttattatacttgctttaaaatacttgaaatatattttgcattaaatgcatttcaagttaaatgtcttaaatgtatacattagatgtgtgttttaaaatgcataaaacacgttgaaatacattaatgaaccattag

SEQ ID NO: 576 - DNA, 3602 bp, Homo sapiens
agaagccatttgaagcagaatccaaaccatgaattgtagagaattacccttgaccctttgggtgcttatatctgtaagcactgcagaatcttgtacttcacgtccccacattactgtggttgaaggggaacctttctatctgaaacattgctcgtgttcacttgcacatgagattgaaacaaccaccaaaagctggtacaaaagcagtggatcacaggaacatgtggagctgaacccaaggagttcctcgagaattgctttgcatgattgtgttttggagttttggccagttgagttgaatgacacaggatcttactttttccaaatgaaaaattatactcagaaatggaaattaaatgtcatcagaagaaataaacacagctgtttcactgaaagacaagtaactagtaaaattgtggaagttaaaaaattttttcagataacctgtgaaaacagttactatcaaacactggtcaacagcacatcattgtataagataggaccacctatttgcaggaaaacaagctcagggctccactgattctacattatgaactgtaaaaagctactactggagaacaataaaaacccaacgataaagaagaacgccgagtttgaagatcaggggtattactcctgcgtgcatttccttcatcataatggaaaactatttaatatcaccaaaaccttcaatataacaatagtggaagatcgcagtaatatagttccggttcttcttggaccaaagcttaaccatgttgcagtggaattaggaaaaaacgtaaggctcaactgctctgctttgctgaatgaagaggatgtaatttattggatgttcggggaagaaaatggatcggatcctaatatacatgaagagaaagaaatgagaattatgactccagaaggcaaatggcatgcttcaaaagtattgagaattgaaaatattggtgaaagcaatctaaatgttttatataattgcactgtggccagcacgggaggcacagacaccaaaagcttcatcttggtgagaaaagcagacatggctgatatcccaggccacgtcttcacaagaggaatgatcatagctgttttgatcttggtggcagtagtgtgcctagtgactgtgtgtgtcatttatagagttgacttggttctattttatagacatttaacgagaagagatgaaacattaacagatggaaaaacatatgatgcttttgtgtcttacctaaaagaatgccgacctgaaaatggagaggagcacacctttgctgtggagattttgcccagggtgttggagaaacattttgggtataagttatgcatatttgaaagggatgtagtgcctggaggagctgttgttgatgaaatccactcactgatagagaaaagccgaagactaatcattgtcctaagtaaaagttatatgtctaatgaggtcaggtatgaacttgaaagtggactccatgaagcattggtggaaagaaaaattaaaataatcttaattgaatttacacctgttactgacttcacattcttgccccaatcactaaagcttttgaaatctcacagagttctgaagtggaaggccgataaatctctttcttataactcaaggttctggaagaaccttctttacttaatgcctgcaaaaacagtcaagccaggtagagacgaaccggaagtcttgcctgttctttccgagtcttaatcttcagaaacagtgaacgccaaaaagaactcaagatattctggggactgagcatatgaacctgttcataacaaaggctgtgactcgaaataattaactttgtcaaaatcctgctcacaatttgaagatgaaacttgtcattaggttggcgggaatgagactaaagattgcgctgtgggctgtggtcacgtgctcccagaagacctggaattcaaaagaaatggagctattctttttctccctctttcataactggatgcagctgctcatactcaatcccatattcagcaagtgtgaagctggacgtgatgcaaaataaccgatgccctacaaaaagggcgcatctttaagagttttaatgccagtgcttaattcgaatgaggggattttaagtgtctgaagaggcattttctagggaccagtgggtgactgagtaactgaaatgctgctttcactccctaacaccatggatctggttgtgcataggatgtgggaggaggggctggcagggccgccttcagaggctgcagggcctcagcctcaggatgcatttaatgtatcctggccacagttgcagccaacggttcttgaaagctcggtaaggccctgcaacgcagagcctgcttatgtggatctatttatgggaacttcttaaaaggaccccagaatagctctttatctttcacaagagacacaaattctaattgagttaattatctgggcctttcactttggatgctctgaaacatttgttgattttgtgtgaatgtttatatcaaaatgtttgccaggttgtattagccattgaatagcaaaaaactgatagttacttgcttgttttttaaaaattacatattaaaaatgcccttggcataaggcagcatggtgtggcagttaagagatgggctgtgcagcccatcctgagctccagtcctgagtttgctacttacttctgtggcctctggaaccttatccaacctcttggtgcttcagtttcctcatctgtgaaattagaatttataataattgcacctacctcccaggggtaactaaatgaataaatataataaagtacttacagtggttcctgacacagactcagcactccgtcagtgttgccatgactatttttattatcattattaatgattacttagatcaattatttagcagtggactaatggaagctacagagcagggaagggaagcagatctagggaggaaggcagttttgatttgaggaggtttgcacatgtagagaagcatactggagaagcatatccagagggcgaaagatatctctccattgtgcatctgcctcttttgacgttggaagacacatgtcttaccccccaaagggagcccagcactgggagccttcttgatgatctcaaaaataatagctattcaagaaaatcaccaagtgactgtgaaaccgtcagttcggaaggctggttagaacatgtgggagcaacatgaatgttctacaaaagtttaaagcagagattgtttcaaatgggtgtagtagatattactgaaaaccaaaaaagagtgagattgtcagtgtaagaatgtgatttaatgtttgtagtgcttacaattttgtgtaccaactggatgactaaaaagagtaaaataatttaattaatagctcatattttatgtgtgaaaacatgttagtgaacatatataatcaaaatagatttcattgctattgcatagtctctaatacatagaatgattttgcttttctcttttattatacttgctttaaaatacttgaaatatattttgcattaaatgcatttcaagttaaatgtcttaaatgtatacattagatgtgtgttttaaaatgcataaaacacgttgaaatacattaatgaaccattag

SEQ ID NO: 577 - DNA, 1268 bp, Homo sapiens
agaagccatttgaagcagaatccaaaccatgaattgtagagaattacccttgaccctttgggtgcttatatctgtaagcactgcagaatcttgtacttcacgtccccacattactgtggttgaaggggaacctttctatctgaaacattgctcgtgttcacttgcacatgagattgaaacaaccaccaaaagctggtacaaaagcagtggatcacaggaacatgtggagctgaacccaaggagttcctcgagaattgctttgcatgattgtgttttggagttttggccagttgagttgaatgacacaggatcttactttttccaaatgaaaaattatactcagaaatggaaattaaatgtcatcagaagaaataaacacagctgtttcactgaaagacaagtaactagtaaaattgtggaagttaaaaaattttttcagataacctgtgaaaacagttactatcaaacactggtcaacagcacatcattgtataagaactgtaaaaagctactactggagaacaataaaaacccaacgataaagaagaacgccgagtttgaagatcaggggtattactcctgcgtgcatttccttcatcataatggaaaactatttaatatcaccaaaaccttcaatataacaatagtggaagatcgcagtaatatagttccggttcttcttggaccaaagcttaaccatgttgcagtggaattaggaaaaaacgtaaggctcaactgctctgctttgctgaatgaagaggatgtaatttattggatgttcggggaagaaaatggatcggatcctaatatacatgaagagaaagaaatgagaattatgactccagaaggcaaatggcatgcttcaaaagtattgagaattgaaaatattggtgaaagcaatctaaatgttttatataattgcactgtggccagcacgggaggcacagacaccaaaagcttcatcttggtgagaaaagggcttgtcgcctgtggtcttccacccctgtgtgattgcctgtgctgtggtccactcacttgtgagggagtggggctcaaatctttgttggaccatcacctggccaggctttcctggggcctgctcaccaccggatcacctctcctttcttagaacagggcaggactgtcctattcctgccctagacgcttctggccagtcaattctcctgctgctgctctcacaaatcagacatggctgatatcccaggccacgtcttcacaagaggaatgatcatagctgttttgatctt

SEQ ID NO: 578 - DNA, 3884 bp, Homo sapiens
gcaggaagcgccagacgcctggggcccacgccgtccgcgggaaaagggcaaggcgctgggttttccagcagcaacctttggaccccgcgatccagtagctccggtaactccacgcggggcgtctgggtggaggagccggtcctggagcacggctgcgaggagcacccggaccggagggtccccagaccgggacctccgagtcagggaggattctacgccagggagcgccccagactgagagcgccccagaccgctacactcccggacccggagcttcgcccgaccgcgggcagtgcccacctgcagcctccaccggccggggttagcagccaggagctgccagacgcctgacattcttctttctgttcctactttttttccttcttcttctttttttttttttttgtagccctctctgggtgccttatctctttaatcacacctctctttcactttccacggtagtcaggaggcggagatcgctgcttctcacctactttctgaacttggcctccgcagtcgcgacctggcgtgaaggaggagctgccgcccccgccccagcctcggggacgcctctctgaagagaagccatttgaagcagaatccaaaccatgaattgtagagaattacccttgaccctttgggtgcttatatctgtaagcactgcagaaattatactcagaaatggaaattaaatgtcatcagaagaaataaacacagctgtttcactgaaagacaagtaactagtaaaattgtggaagttaaaaaattttttcagataacctgtgaaaacagttactatcaaacactggtcaacagcacatcattgtataagaactgtaaaaagctactactggagaacaataaaaacccaacgataaagaagaacgccgagtttgaagatcaggggtattactcctgcgtgcatttccttcatcataatggaaaactatttaatatcaccaaaaccttcaatataacaatagtggaagatcgcagtaatatagttccggttcttcttggaccaaagcttaaccatgttgcagtggaattaggaaaaaacgtaaggctcaactgctctgctttgctgaatgaagaggatgtaatttattggatgttcggggaagaaaatggatcggatcctaatatacatgaagagaaagaaatgagaattatgactccagaaggcaaatggcatgcttcaaaagtattgagaattgaaaatattggtgaaagcaatctaaatgttttatataattgcactgtggccagcacgggaggcacagacaccaaaagcttcatcttggtgagaaaagcagacatggctgatatcccaggccacgtcttcacaagaggaatgatcatagctgttttgatcttggtggcagtagtgtgcctagtgactgtgtgtgtcatttatagagttgacttggttctattttatagacatttaacgagaagagatgaaacattaacagatggaaaaacatatgatgcttttgtgtcttacctaaaagaatgccgacctgaaaatggagaggagcacacctttgctgtggagattttgcccagggtgttggagaaacattttgggtataagttatgcatatttgaaagggatgtagtgcctggaggagctgttgttgatgaaatccactcactgatagagaaaagccgaagactaatcattgtcctaagtaaaagttatatgtctaatgaggtcaggtatgaacttgaaagtggactccatgaagcattggtggaaagaaaaattaaaataatcttaattgaatttacacctgttactgacttcacattcttgccccaatcactaaagcttttgaaatctcacagagttctgaagtggaaggccgataaatctctttcttataactcaaggttctggaagaaccttctttacttaatgcctgcaaaaacagtcaagccaggtagagacgaaccggaagtcttgcctgttctttccgagtcttaatcttcagaaacagtgaacgccaaaaagaactcaagatattctggggactgagcatatgaacctgttcataacaaaggctgtgactcgaaataattaactttgtcaaaatcctgctcacaatttgaagatgaaacttgtcattaggttggcgggaatgagactaaagattgcgctgtgggctgtggtcacgtgctcccagaagacctggaattcaaaagaaatggagctattctttttctccctctttcataactggatgcagctgctcatactcaatcccatattcagcaagtgtgaagctggacgtgatgcaaaataaccgatgccctacaaaaagggcgcatctttaagagttttaatgccagtgcttaattcgaatgaggggattttaagtgtctgaagaggcattttctagggaccagtgggtgactgagtaactgaaatgctgctttcactccctaacaccatggatctggttgtgcataggatgtgggaggaggggctggcagggccgccttcagaggctgcagggcctcagcctcaggatgcatttaatgtatcctggccacagttgcagccaacggttcttgaaagctcggtaaggccctgcaacgcagagcctgcttatgtggatctatttatgggaacttcttaaaaggaccccagaatagctctttatctttcacaagagacacaaattctaattgagttaattatctgggcctttcactttggatgctctgaaacatttgttgattttgtgtgaatgtttatatcaaaatgtttgccaggttgtattagccattgaatagcaaaaaactgatagttacttgcttgttttttaaaaattacatattaaaaatgcccttggcataaggcagcatggtgtggcagttaagagatgggctgtgcagcccatcctgagctccagtcctgagtttgctacttacttctgtggcctctggaaccttatccaacctcttggtgcttcagtttcctcatctgtgaaattagaatttataataattgcacctacctcccaggggtaactaaatgaataaatataataaagtacttacagtggttcctgacacagactcagcactccgtcagtgttgccatgactatttttattatcattattaatgattacttagatcaattatttagcagtggactaatggaagctacagagcagggaagggaagcagatctagggaggaaggcagttttgatttgaggaggtttgcacatgtagagaagcatactggagaagcatatccagagggcgaaagatatctctccattgtgcatctgcctcttttgacgttggaagacacatgtcttaccccccaaagggagcccagcactgggagccttcttgatgatctcaaaaataatagctattcaagaaaatcaccaagtgactgtgaaaccgtcagttcggaaggctggttagaacatgtgggagcaacatgaatgttctacaaaagtttaaagcagagattgtttcaaatgggtgtagtagatattactgaaaaccaaaaaagagtgagattgtcagtgtaagaatgtgatttaatgtttgtagtgcttacaattttgtgtaccaactggatgactaaaaagagtaaaataatttaattaatagctcatattttatgtgtgaaaacatgttagtgaacatatataatcaaaatagatttcattgctattgcatagtctctaatacatagaatgattttgcttttctcttttattatacttgctttaaaatacttgaaatatattttgcattaaatgcatttcaagttaaatgtcttaaatgtatacattagatgtgtgttttaaaatgcataaaacacgttgaaatacattaatgaaccattag

SEQ ID NO: 579 - DNA, 3882 bp, Homo sapiens
ggcaggaagcgccagacgcctggggcccacgccgtccgcgggaaaagggcaaggcgctgggttttccagcagcaacctttggaccccgcgatccagtagctccggtaactccacgcggggcgtctgggtggaggagccggtcctggagcacggctgcgaggagcacccggaccggagggtccccagaccgggacctccgagtcagggaggattctacgccagggagcgccccagactgagagcgccccagaccgctacactcccggacccggagcttcgcccgaccgcgggcagtgcccacctgcagcctccaccggccggggttagcagccaggagctgccagacgcctgacattcttctttctgttcctactttttttccttcttcttctttttttttttttttgtagccctctctgggtgccttatctctttaatcacacctctctttcactttccacggtagtcaggaggcggagatcgctgcttctcacctactttctgaacttggcctccgcagtcgcgacctggcgtgaaggaggagctgccgcccccgccccagcctcggggacgcctctctgaagagaagccatttgaagcagaatccaaaccatgaattgtagagaattacccttgaccctttgggtgcttatatctgtaagcactgcagaaattatactcagaaatggaaattaaatgtcatcagaagaaataaacacagctgtttcactgaaagacaagtaactagtaaaattgtggaagttaaaaaattttttcagataacctgtgaaaacagttactatcaaacactggtcaacagcacatcattgtataagaactgtaaaaagctactactggagaacaataaaaacccaacgataaagaagaacgccgagtttgaagatcaggggtattactcctgcgtgcatttccttcatcataatggaaaactatttaatatcaccaaaaccttcaatataacaatagtggaagatcgcagtaatatagttccggttcttcttggaccaaagcttaaccatgttgcagtggaattaggaaaaaacgtaaggctcaactgctctgctttgctgaatgaagaggatgtaatttattggatgttcggggaagaaaatggatcggatcctaatatacatgaagagaaagaaatgagaattatgactccagaaggcaaatggcatgcttcaaaagtattgagaattgaaaatattggtgaaagcaatctaaatgttttatataattgcactgtggccagcacgggaggcacagacaccaaaagcttcatcttggtgagaaaagacatggctgatatcccaggccacgtcttcacaagaggaatgatcatagctgttttgatcttggtggcagtagtgtgcctagtgactgtgtgtgtcatttatagagttgacttggttctattttatagacatttaacgagaagagatgaaacattaacagatggaaaaacatatgatgcttttgtgtcttacctaaaagaatgccgacctgaaaatggagaggagcacacctttgctgtggagattttgcccagggtgttggagaaacattttgggtataagttatgcatatttgaaagggatgtagtgcctggaggagctgttgttgatgaaatccactcactgatagagaaaagccgaagactaatcattgtcctaagtaaaagttatatgtctaatgaggtcaggtatgaacttgaaagtggactccatgaagcattggtggaaagaaaaattaaaataatcttaattgaatttacacctgttactgacttcacattcttgccccaatcactaaagcttttgaaatctcacagagttctgaagtggaaggccgataaatctctttcttataactcaaggttctggaagaaccttctttacttaatgcctgcaaaaacagtcaagccaggtagagacgaaccggaagtcttgcctgttctttccgagtcttaatcttcagaaacagtgaacgccaaaaagaactcaagatattctggggactgagcatatgaacctgttcataacaaaggctgtgactcgaaataattaactttgtcaaaatcctgctcacaatttgaagatgaaacttgtcattaggttggcgggaatgagactaaagattgcgctgtgggctgtggtcacgtgctcccagaagacctggaattcaaaagaaatggagctattctttttctccctctttcataactggatgcagctgctcatactcaatcccatattcagcaagtgtgaagctggacgtgatgcaaaataaccgatgccctacaaaaagggcgcatctttaagagttttaatgccagtgcttaattcgaatgaggggattttaagtgtctgaagaggcattttctagggaccagtgggtgactgagtaactgaaatgctgctttcactccctaacaccatggatctggttgtgcataggatgtgggaggaggggctggcagggccgccttcagaggctgcagggcctcagcctcaggatgcatttaatgtatcctggccacagttgcagccaacggttcttgaaagctcggtaaggccctgcaacgcagagcctgcttatgtggatctatttatgggaacttcttaaaaggaccccagaatagctctttatctttcacaagagacacaaattctaattgagttaattatctgggcctttcactttggatgctctgaaacatttgttgattttgtgtgaatgtttatatcaaaatgtttgccaggttgtattagccattgaatagcaaaaaactgatagttacttgcttgttttttaaaaattacatattaaaaatgcccttggcataaggcagcatggtgtggcagttaagagatgggctgtgcagcccatcctgagctccagtcctgagtttgctacttacttctgtggcctctggaaccttatccaacctcttggtgcttcagtttcctcatctgtgaaattagaatttataataattgcacctacctcccaggggtaactaaatgaataaatataataaagtacttacagtggttcctgacacagactcagcactccgtcagtgttgccatgactatttttattatcattattaatgattacttagatcaattatttagcagtggactaatggaagctacagagcagggaagggaagcagatctagggaggaaggcagttttgatttgaggaggtttgcacatgtagagaagcatactggagaagcatatccagagggcgaaagatatctctccattgtgcatctgcctcttttgacgttggaagacacatgtcttaccccccaaagggagcccagcactgggagccttcttgatgatctcaaaaataatagctattcaagaaaatcaccaagtgactgtgaaaccgtcagttcggaaggctggttagaacatgtgggagcaacatgaatgttctacaaaagtttaaagcagagattgtttcaaatgggtgtagtagatattactgaaaaccaaaaaagagtgagattgtcagtgtaagaatgtgatttaatgtttgtagtgcttacaattttgtgtaccaactggatgactaaaaagagtaaaataatttaattaatagctcatattttatgtgtgaaaacatgttagtgaacatatataatcaaaatagatttcattgctattgcatagtctctaatacatagaatgattttgcttttctcttttattatacttgctttaaaatacttgaaatatattttgcattaaatgcatttcaagttaaatgtcttaaatgtatacattagatgtgtgttttaaaatgcataaaacacgttgaaatacattaatgaaccattag

SEQ ID NO: 580 - DNA, 3716 bp, Homo sapiens
ggcaggaagcgccagacgcctggggcccacgccgtccgcgggaaaagggcaaggcgctgggttttccagcagcaacctttggaccccgcgatccagtagctccggtaactccacgcggggcgtctgggtggaggagccggtcctggagcacggctgcgaggagcacccggaccggagggtccccagaccgggacctccgagtcagggaggattctacgccagggagcgccccagactgagagcgccccagaccgctacactcccggacccggagcttcgcccgaccgcgggcagtgcccacctgcagcctccaccggccggggttagcagccaggagctgccagacgcctgacattcttctttctgttcctactttttttccttcttcttctttttttttttttttgtagccctctctgggtgccttatctctttaatcacacctctctttcactttccacggtagtcaggaggcggagatcgctgcttctcacctactttctgaacttggcctccgcagtcgcgacctggcgtgaaggaggagctgccgcccccgccccagcctcggggacgcctctctgaagagaagccatttgaagcagaatccaaaccatgaattgtagagaattacccttgaccctttgggtgcttatatctgtaagcactgcagaactgtaaaaagctactactggagaacaataaaaacccaacgataaagaagaacgccgagtttgaagatcaggggtattactcctgcgtgcatttccttcatcataatggaaaactatttaatatcaccaaaaccttcaatataacaatagtggaagatcgcagtaatatagttccggttcttcttggaccaaagcttaaccatgttgcagtggaattaggaaaaaacgtaaggctcaactgctctgctttgctgaatgaagaggatgtaatttattggatgttcggggaagaaaatggatcggatcctaatatacatgaagagaaagaaatgagaattatgactccagaaggcaaatggcatgcttcaaaagtattgagaattgaaaatattggtgaaagcaatctaaatgttttatataattgcactgtggccagcacgggaggcacagacaccaaaagcttcatcttggtgagaaaagacatggctgatatcccaggccacgtcttcacaagaggaatgatcatagctgttttgatcttggtggcagtagtgtgcctagtgactgtgtgtgtcatttatagagttgacttggttctattttatagacatttaacgagaagagatgaaacattaacagatggaaaaacatatgatgcttttgtgtcttacctaaaagaatgccgacctgaaaatggagaggagcacacctttgctgtggagattttgcccagggtgttggagaaacattttgggtataagttatgcatatttgaaagggatgtagtgcctggaggagctgttgttgatgaaatccactcactgatagagaaaagccgaagactaatcattgtcctaagtaaaagttatatgtctaatgaggtcaggtatgaacttgaaagtggactccatgaagcattggtggaaagaaaaattaaaataatcttaattgaatttacacctgttactgacttcacattcttgccccaatcactaaagcttttgaaatctcacagagttctgaagtggaaggccgataaatctctttcttataactcaaggttctggaagaaccttctttacttaatgcctgcaaaaacagtcaagccaggtagagacgaaccggaagtcttgcctgttctttccgagtcttaatcttcagaaacagtgaacgccaaaaagaactcaagatattctggggactgagcatatgaacctgttcataacaaaggctgtgactcgaaataattaactttgtcaaaatcctgctcacaatttgaagatgaaacttgtcattaggttggcgggaatgagactaaagattgcgctgtgggctgtggtcacgtgctcccagaagacctggaattcaaaagaaatggagctattctttttctccctctttcataactggatgcagctgctcatactcaatcccatattcagcaagtgtgaagctggacgtgatgcaaaataaccgatgccctacaaaaagggcgcatctttaagagttttaatgccagtgcttaattcgaatgaggggattttaagtgtctgaagaggcattttctagggaccagtgggtgactgagtaactgaaatgctgctttcactccctaacaccatggatctggttgtgcataggatgtgggaggaggggctggcagggccgccttcagaggctgcagggcctcagcctcaggatgcatttaatgtatcctggccacagttgcagccaacggttcttgaaagctcggtaaggccctgcaacgcagagcctgcttatgtggatctatttatgggaacttcttaaaaggaccccagaatagctctttatctttcacaagagacacaaattctaattgagttaattatctgggcctttcactttggatgctctgaaacatttgttgattttgtgtgaatgtttatatcaaaatgtttgccaggttgtattagccattgaatagcaaaaaactgatagttacttgcttgttttttaaaaattacatattaaaaatgcccttggcataaggcagcatggtgtggcagttaagagatgggctgtgcagcccatcctgagctccagtcctgagtttgctacttacttctgtggcctctggaaccttatccaacctcttggtgcttcagtttcctcatctgtgaaattagaatttataataattgcacctacctcccaggggtaactaaatgaataaatataataaagtacttacagtggttcctgacacagactcagcactccgtcagtgttgccatgactatttttattatcattattaatgattacttagatcaattatttagcagtggactaatggaagctacagagcagggaagggaagcagatctagggaggaaggcagttttgatttgaggaggtttgcacatgtagagaagcatactggagaagcatatccagagggcgaaagatatctctccattgtgcatctgcctcttttgacgttggaagacacatgtcttaccccccaaagggagcccagcactgggagccttcttgatgatctcaaaaataatagctattcaagaaaatcaccaagtgactgtgaaaccgtcagttcggaaggctggttagaacatgtgggagcaacatgaatgttctacaaaagtttaaagcagagattgtttcaaatgggtgtagtagatattactgaaaaccaaaaaagagtgagattgtcagtgtaagaatgtgatttaatgtttgtagtgcttacaattttgtgtaccaactggatgactaaaaagagtaaaataatttaattaatagctcatattttatgtgtgaaaacatgttagtgaacatatataatcaaaatagatttcattgctattgcatagtctctaatacatagaatgattttgcttttctcttttattatacttgctttaaaatacttgaaatatattttgcattaaatgcatttcaagttaaatgtcttaaatgtatacattagatgtgtgttttaaaatgcataaaacacgttgaaatacattaatgaaccattag

SEQ ID NO: 581 - DNA, 3445 bp, Homo sapiens
attatgtaattttcccaaaagccccacctcgcctcagccgggcgggagagagggaggtctcgcgctttccccggggttgcgtcccgccccgcaggctgcgcgcaggcgctgacgagccgctcgcattctacgtaacggacggcggaggctacgtgaagagaggcgcggcgtgactgagctacggttctggctgcgtcctagaggcatccggggcagtaaaaccgctgcgatcgcggaggcggcggccaggccgagaggcaggccgggcaggggtgtcggacgcagggcgctgggccgggtttcggcttcggccacagctttttttctcaaggtgcaatgaaagccttccacactttctgtgttgtccttctggtgtttgggagtgtctctgaagccaagtttgatgattttgaggatgaggaggacatagtagagtatgatgataatgacttcgctgaatttgaggatgtcatggaagactctgttactgaatctcctcaacgggtcataatcactgaagatgatgaagatgagaccactgtggagttggaagggcaggatgaaaaccaagaaggagattttgaagatgcagatacccaggagggagatactgagagtgaaccatatgatgatgaagaatttgaaggttatgaagacaaaccagatacttcttctagcaaaaataaagacccaataacgattgttgatgttcctgcacacctccagaacagctgggagagttattatctagaaattttgatggtgactggtctgcttgcttatatcatgaattacatcattgggaagaataaaaacagtcgccttgcacaggcctggtttaacactcatagggagcttttggagagcaactttactttagtgggggatgatggaactaacaaagaagccacaagcacaggaaagttgaaccaggagaatgagcacatctataacctgtggtgttctggtcgagtgtgctgtgagggcatgcttatccagctgaggttcctcaagagacaagacttactgaatgtcctggcccggatgatgaggccagtgagtgatcaagtgcaaataaaagtaaccatgaatgatgaagacatggatacctacgtatttgctgttggcacacggaaagccttggtgcgactacagaaagagatgcaggatttgagtgagttttgtagtgataaacctaagtctggagcaaagtatggactgccggactctttggccatcctgtcagagatgggagaagtcacagacggaatgatggatacaaagatggttcactttcttacacactatgctgacaagattgaatctgttcatttttcagaccagttctctggtccaaaaattatgcaagaggaaggtcagcctttaaagctacctgacactaagaggacactgttgtttacatttaatgtgcctggctcaggtaacacttacccaaaggatatggaggcactgctacccctgatgaacatggtgatttattctattgataaagccaaaaagttccgactcaacagagaaggcaaacaaaaagcagataagaaccgtgcccgagtagaagagaacttcttgaaactgacacatgtgcaaagacaggaagcagcacagtctcggcgggaggagaaaaaaagagcagagaaggagcgaatcatgaatgaggaagatcctgagaaacagcgcaggctggaggaggctgcattgaggcgtgagcaaaagaagttggaaaagaagcaaatgaaaatgaaacaaatcaaagtgaaagccatgtaaagccatcccagagatttgagttctgatgccacctgtaagctctgaattcacaggaaacatgaaaaacgccagtccatttctcaaccttaaatttcagacagtcttgggcaactgagaaatccttatttcatcatctactctgtttggggtttggggttttacagagattgaagatacctggaaagggctctgtttcaagaatttttttttccagataatcaaattattttgattattttataaaaggaatgatctatgaaatctgtgtaggttttaaatattttaaaaattataatacaaatcatcagtgcttttagtacttcagtgtttaaagaaataccgtgaaatttataggtagataaccagattgttgctttttgtttaaaccaagcagttgaaatggctataaagactgactctaaaccaagattctgcaaataatgattggaattgcacaataaacattgcttgatgttttcttgtatgtctacattaaacttgagaaaaagtaaaaattagaacactgtatgtagtaatgaaatttcagggacccagaacataatgtagtatatgtttttaggtgggagatgctgataacaaaattaataggaagtctgtaggcattaggatactgacatgtacatggaaaattctagggacaggagcatcattttttccttacctgataccacgaaccagtgacaacgtgaatgctgtattttaagtggttgtatgtttattttcttgagtaacaaatgcatgaaaaattaatgcttcacctaggtaagatcattggtctgtgtgaaatcacaaatgttttttccttcttggttgctgcagcctggtggatgttcatggagaagctctgttctctatattatggctgtgtgccgttgcttctccctctgcttttatcttttccacagttgaggctgggtatgttctttcaaagaaatggccatgaatatgtgtaagtatacttttgaaaatgagctttcctaaactattgagagttctttccacctcttgcggaaccaactcttggaggagaggcccatgtatctgcacgagcacttagcttgttcagatctctgcattttataaatgcttcttaccaagaaagcatttttaggtcattgcttgtaccaggtaatttttgccggggatgggtaagggttgggttttctggtgggagtggggtggtgggtattttttgttgatgctttagtgcaggcctgttctgaggcaataacaagttgctgtgaaaacagcatgtgctgctgcctttgtaactgcatggaaacttttcacatgggtttttctccaagttaatacagaaatatgtaaactgagagatgcaaatgtaatatttttaacagttcatgaagttgttattaaaataactaacataaaacttaattactttaatattatataattatagtagtggccttgttttacaaacctttaaattacattttagaaatcaaagttgatagtcttagttatcttttgagtaagaaaagctttcctaaagtcccatacatttggaccatggcagctaattttgtaacttaagcattcatatgaactacctatggacatctattaaagtgattgacaaaatctcaaaaaaaaaaaaaaaaaaaaaaaaaaa

SEQ ID NO: 582 - DNA, 2174 bp, Homo sapiens
gtcgctgaggaactattggatgagcttgcagaaaataatcaaaccagacttgttagcgcttgtgtgaattttccttggtcctgtgttgcttgcttcaggagtcatagaggctgggtggtctggcaaggacttgtgcatttgagaactgacaggtgcagcggagacttctaagagggaaaaccaagctttttttctcaaggtgcaatgaaagccttccacactttctgtgttgtccttctggtgtttgggagtgtctctgaagccaagtttgatgattttgaggatgaggaggacatagtagagtatgatgataatgacttcgctgaatttgaggatgtcatggaagactctgttactgaatctcctcaacgggtcataatcactgaagatgatgaagatgagaccactgtggagttggaagggcaggatgaaaaccaagaaggagattttgaagatgcagatacccaggagggagatactgagagtgaaccatatgatgatgaagaatttgaaggttatgaagacaaaccagatacttcttctagcaaaaataaagacccaataacgattgttgatgttcctgcacacctccagaacagctgggagagttattatctagaaattttgatggtgactggtctgcttgcttatatcatgaattacatcattgggaagaataaaaacagtcgccttgcacaggcctggtttaacactcatagggagcttttggagagcaactttactttagtgggggatgatggaactaacaaagaagccacaagcacaggaaagttgaaccaggagaatgagcacatctataacctgtggtgttctggtcgagtgtgctgtgagggcatgcttatccagctgaggttcctcaagagacaagacttactgaatgtcctggcccggatgatgaggccagtgagtgatcaagtgcaaataaaagtaaccatgaatgatgaagacatggatacctacgtatttgctgttggcacacggaaagccttggtgcgactacagaaagagatgcaggatttgagtgagttttgtagtgataaacctaagtctggagcaaagtatggactgccggactctttggccatcctgtcagagatgggagaagtcacagacggaatgatggatacaaagatggttcactttcttacacactatgctgacaagattgaatctgttcatttttcagaccagttctctggtccaaaaattatgcaagaggaaggtcagcctttaaagctacctgacactaagaggacactgttgtttacatttaatgtgcctggctcaggtaacacttacccaaaggatatggaggcactgctacccctgatgaacatggtgatttattctattgataaagccaaaaagttccgactcaacagagaaggcaaacaaaaagcagataagaaccgtgcccgagtagaagagaacttcttgaaactgacacatgtgcaaagacaggaagcagcacagtctcggcgggaggagaaaaaaagagcagagaaggagcgaatcatgaatgaggaagatcctgagaaacagcgcaggctggaggaggctgcattgaggcgtgagcaaaagaagttggaaaagaagcaaatgaaaatgaaacaaatcaaagtgaaagccatgtaaagccatcccagagatttgagttctgatgccacctgtaagctctgaattcacaggaaacatgaaaaacgccagtccatttctcaaccttaaatttcagacagtcttgggcaactgagaaatccttatttcatcatctactctgtttggggtttggggttttacagagattgaagatacctggaaagggctctgtttcaagaatttttttttccagataatcaaattattttgattattttataaaaggaatgatctatgaaatctgtgtaggttttaaatattttaaaaattataatacaaatcatcagtgcttttagtacttcagtgtttaaagaaataccgtgaaatttataggtagataaccagattgttgctttttgtttaaaccaagcagttgaaatggctataaagactgactctaaaccaagattctgcaaataatgattggaattgcacaataaacattgcttgatgttttcttgtatgtctacattaaacttgagaaaaagtaaaaatta

SEQ ID NO: 583 - DNA, 7394 bp, Homo sapiens
ggtgagagctgcgcagcgctggctgctggctggcctcgcggagacgccgaacggacgcggccggcgccggcttgtgggctcgccgcctgcagccatgaccctcgcagcctgtccctcggcctcggcccgggacgtctaaaatcccacacagtcgcgcgcagctgctggagagccggccgctgccccctcgtcgccgcatcacactcccgtcccgggagctgggagcagcgcgggcagccggcgcccccgtgcaaactgggggtgtctgccagagcagccccagccgctgccgctgctacccccgatgctggccatggcctggcggggcgcagggccgagcgtcccgggggcgcccgggggcgtcggtctcagtctggggttgctcctgcagttgctgctgctcctggggccggcgcggggcttcggggacgaggaagagcggcgctgcgaccccatccgcatctccatgtgccagaacctcggctacaacgtgaccaagatgcccaacctggttgggcacgagctgcagacggacgccgagctgcagctgacaactttcacaccgctcatccagtacggctgctccagccagctgcagttcttcctttgttctgtttatgtgccaatgtgcacagagaagatcaacatccccattggcccatgcggcggcatgtgtctttcagtcaagagacgctgtgaacccgtcctgaaggaatttggatttgcctggccagagagtctgaactgcagcaaattcccaccacagaacgaccacaaccacatgtgcatggaagggccaggtgatgaagaggtgcccttacctcacaaaacccccatccagcctggggaagagtgtcactctgtgggaaccaattctgatcagtacatctgggtgaaaaggagcctgaactgtgtgctcaagtgtggctatgatgctggcttatacagccgctcagccaaggagttcactgatatctggatggctgtgtgggccagcctgtgtttcatctccactgccttcacagtactgaccttcctgatcgattcttctaggttttcctaccctgagcgccccatcatatttctcagtatgtgctataatatttatagcattgcttatattgtcaggctgactgtaggccgggaaaggatatcctgtgattttgaagaggcagcagaacctgttctcatccaagaaggacttaagaacacaggatgtgcaataattttcttgctgatgtacttttttggaatggccagctccatttggtgggttattctgacactcacttggtttttggcagcaggactcaaatggggtcatgaagccattgaaatgcacagctcttatttccacattgcagcctgggccatccccgcagtgaaaaccattgtcatcttgattatgagactggtggatgcagatgaactgactggcttgtgctatgttggaaaccaaaatctcgatgccctcaccgggttcgtggtggctcccctctttacttatttggtcattggaactttgttcattgctgcaggtttggtggccttgttcaaaattcggtcaaatcttcaaaaggatgggacaaagacagacaagttagaaagactgatggtcaagattggggtgttctcagtactgtacacagttcctgcaacgtgtgtgattgcctgttatttttatgaaatctccaactgggcactttttcggtattctgcagatgattccaacatggctgttgaaatgttgaaaatttttatgtctttgttggtgggcatcacttcaggcatgtggatttggtctgccaaaactcttcacacgtggcagaagtgttccaacagattggtgaattctggaaaggtaaagagagagaagagaggaaatggttgggtgaagcctggaaaaggcagtgagactgtggtataaggctagtcagcctccatgctttcttcattttgaaggggggaatgccagcattttggaggaaattctactaaaagttttatgcagtgaatctcagtttgaacaaactagcaacaattaagtgacccccgtcaacccactgcctcccaccccgaccccagcatcaaaaaaccaatgattttgctgcagactttggaatgatccaaaatggaaaagccagttagaggctttcaaagctgtgaaaaatcaaaacgttgatcactttagcaggttgcagcttggagcgtggaggtcctgcctagattccaggaagtccagggcgatactgttttcccctgcagggtgggatttgagctgtgagttggtaactagcagggagaaatattaacttttttaaccctttaccattttaaatactaactgggtctttcagatagcaaagcaatctataaacactggaaacgctgggttcagaaaagtgttacaagagttttatagtttggctgatgtaacataaacatcttctgtggtgcgctgtctgctgtttagaactttgtggactgcactcccaagaagtggtgttagaatctttcagtgcctttgtcataaaacagttatttgaacaaacaaaagtactgtactcacacacataaggtatccagtggatttttcttctctgtcttcctctcttaaatttcaacatctctcttcttggctgctgctgttttcttcattttatgttaatgactcaaaaaaggtatttttatagaatttttgtactgcagcatgcttaaagaggggaaaaggaagggtgattcactttctgacaatcacttaattcagaggaaaatgagatttactaagttgacttacctgacggaccccagagacctattgcattgagcagtggggacttaatatattttacttgtgtgattgcatctatgcagacgccagtctggaagagctgaaatgttaagtttcttggcaactttgcattcacacagattagctgtgtaatttttgtgtgtcaattacaattaaaagcacattgttggaccatgacatagtatactcaactgactttaaaactatggtcaacttcaacttgcattctcagaatgatagtgcctttaaaaatttttttattttttaaagcataagaatgttatcagaatctggtctacttaggacaatggagactttttcagttttataaagggaactgaggacagctaatccaactacttggtgcgtaattgtttcctagtaattggcaaaggctccttgtaagatttcactggaggcagtgtggcctggagtatttatatggtgcttaatgaatctccagaatgccagccagaagcctgattggttagtagggaataaagtgtagaccatatgaaatgaactgcaaactctaatagcccaggtcttaattgcctttagcagaggtatccaaagcttttaaaatttatgcatacgttcttcacaagggggtacccccagcagcctctcgaaaattgcacttctcttaaaactgtaactggcctttctcttaccttgccttaggccttctaatcatgagatcttggggacaaattgactatgtcacaggttgctctccttgtaactcatacctgtctgcttcagcaactgctttgcaatgacatttatttattaattcatgccttaaaaaaataggaagggaagcttttttttttctttttttttttttcaatcacactttgtggaaaaacatttccagggactcaaaattccaaaaaggtggtcaaattctggaagtaagcatttcctcttttttaaaaatttggtttgagccttatgcccatagtttgacatttccctttcttctttcctttttgtttttgtgtggttcttgagctctctgacatcaagatgcatgtaaagtcgattgtatgttttggaaggcaaagtcttggcttttgagactgaagttaagtgggcacaggtggcccctgctgctgtgcccagtctgagtaccttggctagactctaggtcaggctccaggagcatgagaattgatccccagaagaaccattttaactccatctgatactccattgcctatgaaatgtaaaatgtgaactccctgtgctgcttgtagacagttcccataactgtccacggccctggagcacgcacccaggggcagagcctgcccttactcacgctctgctctggtgtcttgggagttgtgcagggactctggcccaggcaggggaaggaagaccaggcggtaggggactggtcttgctgttagagtatagaggtttgtaatgcagttttcttcataatgtgtcagtgattgtgtgaccaaggcagcatctagcagaaagccaggcatggagtaggtgatcgatacttgtcaatgactaaataataacaataaaagagcacttgggtgaatctgggcacctgatttctgagttttgagttctggagctagtgttttgacaatgctttgggttttgacatgccttttccacaaatctcttgccttttcagggcaaagtgtatttgatcagaagtggccatttggattagtagccttagcaatgctacagggttataggcctctcctttcacattccagacaatggagagtgtttatggtttcaggaaaagaactttgtggctgaggggtcagttaccagtgaccttcaatcaactccatcacttcttaaatcggtatttgttaaaaaaatcagttattttatttattgagtgccgactgtagtaaagccctgaaatagataatctctgttcttctaactgatctaggatggggacgcacccaggtctgctgaactttactgttcctctgggaaaggagcagggacctctggaattcccatctgtttcactgtctccattccataaatctcttcctgtgtgagccaccacacccagcctgggtctctctacttttaacacatctctcatccctttcccaggattccttccaagtcagttacaggtggttttaacagaaagcatcagctctgcttcgtgacagtctctggagaaatcccttaggaagactatgagagtaggccacaaggacatgggcccacacatctgctttggctttgccggcaattcagggcttggggtattccatgtgacttgtataggtatatttgaggacagcatcttgctagagaaaaggtgagggttgtttttctttctctgaaacctacagtaaatgggtatgattgtagcttcctcagaaatcccttggcctccagagattaaacatggtgcaatggcacctctgtccaacctcctttctggtagattcctttctcctgcttcatataggccaaacctcagggcaagggaacatgggggtagagtggtgctggccagaaccatctgcttgagctacttggttgattcatatcctctttcctttatggagacccatttcctgatctctgagactgttgctgaactggcaacttacttgggcctgaaactggagaaggggtgacatttttttaatttcagagatgctttctgattttcctctcccaggtcactgtctcacctgcactctccaaactcaggttccgggaagcttgtgtgtctagatactgaattgagattctgttcagcaccttttagctctatactctctggctcccctcatcctcatggtcactgaattaaatgcttattgtattgagaaccaagatgggacctgaggacacaaagatgagctcaacagtctcagccctagaggaatagactcagggatttcaccaggtcggtgcagtatttgatttctggtgaggtgaccacagctgcagttagggaagggagccattgagcacagactttggaaggaaccttttttttgttgtttgtttgtttgtttgtttgtttgtttgtttgagacagggtcttgctctgtcacccaggctggggcgcaatggcacgatcttggctcactgcaacctctgcctcctgggttcaagtgattctcctgccacagcctcctgaggagctgggactacaggtgcgtgctaccacgcccagctacttctgtatttttagtagagacggggtttcactgtgttggccaggctggtctcgaactcctgacctcatgatctgcccgcctcagcctcccaaagtgctgggattacaagtgtgagccaccacacctggcctggaaggaacctcttaaaatcagtttacgtcttgtattttgttctgtgatggaggacactggagagagttgctattccagtcaatcatgtcgagtcactggactctgaaaatcctattggttcctttattttatttgagtttagagttcccttctgggtttgtattatgtctggcaaatgacctgggttatcacttttcctccagggttagatcatagatcttggaaactccttagagagcattttgctcctaccaaggatcagatactggagccccacataatagatttcatttcactctagcctacatagagctttctgttgctgtctcttgccatgcacttgtgcggtgattacacacttgacagtaccaggagacaaatgacttacagatcccccgacatgcctcttccccttggcaagctcagttgccctgatagtagcatgtttctgtttctgatgtaccttttttctcttcttctttgcatcagccaattcccagaatttccccaggcaatttgtagaggacctttttggggtcctatatgagccatgtcctcaaagcttttaaacctccttgctctcctacaatattcagtacatgaccactgtcatcctagaaggcttctgaaaagaggggcaagagccactctgcgccacaaaggttgggtccatcttctctccgaggttgtgaaagttttcaaattgtactaataggctggggccctgacttggctgtgggctttgggaggggtaagctgctttctagatctctcccagtgaggcatggaggtgtttctgaattttgtctacctcacagggatgttgtgaggcttgaaaaggtcaaaaaatgatggccccttgagctctttgtaagaaaggtagatgaaatatcggatgtaatctgaaaaaaagataaaatgtgacttcccctgctctgtgcagcagtcgggctggatgctctgtggcctttcttgggtcctcatgccaccccacagctccaggaaccttgaagccaatctgggggactttcagatgtttgacaaagaggtaccaggcaaacttcctgctacacatgccctgaatgaattgctaaatttcaaaggaaatggaccctgcttttaaggatgtacaaaagtatgtctgcatcgatgtctgtactgtaaatttctaatttatcactgtacaaagaaaaccccttgctatttaattttgtattaaaggaaaataaagttttgtttgttaggtt

SEQ ID NO: 584 - DNA, 4245 bp, Homo sapiens
ctcttcagcgcacttggcgagctggtgaggtgagagggatactgcgagagggctaggggcggccagtccggggctgccggccaaggctaggcgctgccagcccgattctcctctgctctccacccccgcctcacccagtggccggccggacctgcaccccgcgcttgaccccgctcatcctccccccgcccggccgggcgcgctcctccccggccggcccctcggcgcgcggcgcgctggaggcgaacgcgggctgaggcgaacgcgggctgagccgagcgcagtggccgccgaccaccgagcgccccgcgccgctccctgcatgtgcggcccgcggcggctcgcagctcccggcagcagcctcggcagcttcggccgcgcctcgagaggcggccgcagaggctccagcggcggccgagcggccgagcccgggctgggagacaccatgcgccgcgtccttcggctgctcctcggttgcttcctcaccgagctgtgcgcccgcgtgtgccgggcgcaggagcgagcgggacacgggcagctggcgcaactgggcggcgtgttgctgctggcggggggcaaccgctccggggccgcctccggagaggccagcgagggcgctgaggcatcggacgcgcccccgacccgggcgcccacgccggacttctgccggggctacttcgatgtcatgggccagtgggacccgccgttcaactgcagctcgggcgacttcatcttctgctgcgggacttgtggcttccggttctgctgcacgtttaagaagcggcgactgaaccaaagcacctgcaccaactacgacacgccgctctggctcaacaccggcaagccccccgcccgcaaggacgaccccttgcacgaccccaccaaggacaagaccaacctgatcgtctacatcatctgcggggtggtggccgtcatggtgctcgtgggcatcttcaccaagctggggctggagaaagcgcaccggccccaaagggagcacatgtccaggctctatgacaatctgctgtttatggaggcacagatttctttccaagaggacgaacctgcccctggagagtggagtgtcggacttcaaacctggacagtctgagtgcacggatccttggccgctaggctgcactgcgtttgagtgcaaacctgcaggaattccagacttctcagatcacagagaagtacgcgatgccctgcaaacaacagctcatgcatcggggccagttcaagaagctaccgtaagatgaagtctaggaatgctttctatatcggccccggcaggcccagacgtcttggtggaggcgttggtgagaaatgaccttggggacagaagcacatatgtgaagctctctacacttgaagccagtagggaacacatgtcattattttgtccaccttcaaacagaattggaaatccaagtggcaaatggcagataagggtcctgtgtgtttttaaaacatgcttcagaagaactggcaccccttggaaagaaatagcaacaaataatgataaatgcacctcctcctcttgccttttgccttccagtttctctcctgcctctcatctttctatgcatttgtggttatcctaaggctttgaccagcttcccaggctggagaagtccatgtgtgcatgcatctactgttggccacagaaaagtcttaatttatttttctttgcagggtatgttgacttctctttgggcactgagtccttgcattttaaaaatcaacttcattgaagtataatttacacaataaaatgcacacattgtaagtgtgtagtttgatgagcttggacaaatgtctatacctgtgtaatcattactctagaaagctcactcatgcccattgcccttgcatttttgaaaaataattgatgcttcttgtgcaagaagaagtgctcaggaactctattcaagtgtttaaaagtcaacacatagattggacattgggatacctggaggctttgaagcaagataccgggactctgagttctgtttggaaatattggtgtcatatatttgtcattgtaattggaaagaaaagagatgcaccattttcttcttgttctttggataagctaagctcattcccatcttggagctgttgcactggcccttgtgtggctggtccctcctcatcaccagggtcccagctccaatgtcatcttctctgagaagccgtccctgaccaggcttagttgcttcccaccccagcctgacacactccagcccatcacccagtcagtgttatttgcttcatttttacattatggtctaaaattaacttgctagtttactggtttactagtttattatctgtctccttccattatccctctccttccctccttcccttccccttccttccttccttccttccttccttcgagacacagtcgtactctgtcaccccggctggagtgcagtggtgtgatcttgcctcactacaacccctgcctcctgggttttagcgattcttctgcctcagcctcccgagtagctgggactacaggcacccaccatgatgccaggctaatttttgtatttttattggagacagggtttcaccatgttggccaggctggtctcgaactcttgacctcaagtgatccacctgtctcggcctcccaaagtgctgggattacaggcatgagccactgcacctggcccttttattattcatagtaagacacacagggaccacaattgtctcttctactcagtagttggattctgagtgcctagttcagtatttggcaagtaagagttctgcatttgatatcctggtttacctggcacaacaaagtatctccaaattcattcattcattctttcattcattcgataggtatttactgaacatctaacttatgcccaacactgtgctgagagatatgagataaccatgaatagtacaaaagcaatccctgcccttgaagagcaaacagccaaatatcaggagacaggtaacacacaaggaaatgtacaagaaagttgagccagcacttttataagtactggttctagtactagctttcataagaaagtactggttctagtactagctttcagtactctcttgtgaaattttcaatattcagtcatttcaacctcaaaaatggcaacataattatgtttcaacataattgttgttttaaacaaacaattttgtttcaacataattctcctgaactgggtggaaggctatcaagaaaaagcttagcttcttcttcaggtaactgcaagagacagggttctctagagaaacagaacaaatatacaaagagattcattataaggaattggaagtccaaaatctccagagcctctgtacttgtacaagtctgaaggccgacaggcaggagaattctctctttttggggcaaaggtcagtgttttgttctatccaggctttcagatgattggttgaggctcactcacattagaagggcaatctgtcttactgccattagaatgcaacctgttttacttagcttactgatttcaatgttaatctatttcaagagcaccctcacagaaacacccagaataatgtttgatgaaatatctgggcaccctgtgacccagtcaagttgacacatgacactaaccatcacagtacgcttagggtcttgtcactcggagtgtggcctgtgaaccagcagcatttttatcttctgggagcttgggcacgatctcaggccccacctcctgcttattgattcagaatctgcattttaacaagatccccaggtgatctggatgcaccgtaacatctgagaagcactcaaactatgtgccgcaaacaaacgccaaattcttaggcatttgtgtggcttggagcacatagttggttctttctactgtctaattcattacattttttcagcacattcctgtctataaaatgtttttttgtatgcaccccaatatatgcacatttataagcatatgcatgaacccacgaacaatgattaggtacattatgaagcatacgtaaggacagaaatttcaaaccaagcttgagggtgaaataaatattatttgaaaacctgttgctaattgtgatgacttcatactatcattagttactatctcaatgcataatgtacagtgacgggtgaagtttatcattaataaaaaaaatctggattttaaccattaaaaaaaaaaaaaaaaaaaaaaaaaaaaaaaaaaaaaaaaaaaaaaaaaaaaaaaaaaaaaaaaa

SEQ ID NO: 585 - DNA, 6738 bp, Homo sapiens
ctcttcagcgcacttggcgagctggtgaggtgagagggatactgcgagagggctaggggcggccagtccggggctgccggccaaggctaggcgctgccagcccgattctcctctgctctccacccccgcctcacccagtggccggccggacctgcaccccgcgcttgaccccgctcatcctccccccgcccggccgggcgcgctcctccccggccggcccctcggcgcgcggcgcgctggaggcgaacgcgggctgaggcgaacgcgggctgagccgagcgcagtggccgccgaccaccgagcgccccgcgccgctccctgcatgtgcggcccgcggcggctcgcagctcccggcagcagcctcggcagcttcggccgcgcctcgagaggcggccgcagaggctccagcggcggccgagcggccgagcccgggctgggagacaccatgcgccgcgtccttcggctgctcctcggttgcttcctcaccgagctgtgcgcccgcgtgtgccgggcgcaggagcgagcgggacacgggcagctggcgcaactgggcggcgtgttgctgctggcggggggcaaccgctccggggccgcctccggagaggccagcgagggcgctgaggcatcggacgcgcccccgacccgggcgcccacgccggacttctgccggggctacttcgatgtcatgggccagtgggacccgccgttcaactgcagctcgggcgacttcatcttctgctgcgggacttgtggcttccggttctgctgcacgtttaagaagcggcgactgaaccaaagcacctgcaccaactacgacacgccgctctggctcaacaccggcaagccccccgcccgcaaggacgaccccttgcacgaccccaccaaggacaagaccaacctgatcgtctacatcatctgcggggtggtggccgtcatggtgctcgtgggcatcttcaccaagctggggctggagaaagcgcaccggccccaaagggagcacatgtccagggcccttgcggatgtcatgagaccacagggccactgcaacactgatcacatggagagagacctaaacatcgttgtccacgtccagcattatgagaacatggacacgagaacccccataaataatcttcatgccacccagatgaacaacgcagtgcccacctctcctctgctccagcagatgggccatccacattcgtacccgaacctgggccagatctccaacccctatgaacagcagccaccaggaaaagagctcaacaagtacgcctccttaaaggcagtcggaagttctgatggtgactgggcagtatcgacacttaagtcaccaaaagctgacaaggtcaatgacgacttctacaccaagcgacggcacctggctgagctggctgccaaggggaacttacctctgcaccccgtaagagtggaggacgagccccgggccttcagccctgagcacggtcctgccaagcagaatggacagaagtcccgcaccaacaagatgcccccacatcccctggcctacacctctaccaccaactttaagggctgggaccccaacgagcagtccctccggcggcaggcttacagcaacaagggcaagcttggcacggccgagacaggctccagcgaccccttgggaactcgcccccagcactacccacccccacagccatacttcatcaccaacagcaaaacagaagtgactgtctgagctttcaccacagggagcaccctggagaccacactcaactgagagaggcaaaaaacaaccccgcccacaccctccccatcctcccctaatacatgcgtccacacactcactctcaacaagaaccaactctaaacctactggggacacagagtcgcgcttttcctaggtcatgcctgtaacgtgtcggcgggcagctgagaaagaccgaagcgtggacattcagcaatacagcaaaggggaaaatgaggcacactctttccacttcaggcccaagatggccaactcacatgcccaaaccgtggggctgagttttcttttcctcctaacttgaaactgaaatccatggtgacaaaatataaaagtagcacaatttagagaaattgtccatttgagcacatacactacttgccacgtgctgtctgtttctaggttcgaaagccagggtggaaatgggggtagagaatgagggaggacacaagagaagagtgtattctggaagaggagttgttctgggaggaatttgcccacattagaagcatttttctaattccaagaagtggtgacgtggacgtaaaattttgacgagcatgaaacagtaactggaccccaaccattctatttatagtacttttcatatcatccatgttgaaagcaaaaaacaacacaccctcaaactcacagaaagtaaatagaccctgaacccaccgacaatgatgggaaggaaaaaacaaaaaacaaaaaacattttagagaactcccataaggaccatgaccgtggaaatgggagggatgggcttttacggagagggtccggagagtatcaaataactttttaaaaagaggattaaaatgtaagcccactacaaaacagataaaaacggcaaattaggtgttttttttttttcaaaaatcttgaagacttgttgacattaacaacaacaaatccacagttggaaaagtccacaggagatcagatgaggatccagaagcctctgatttctgggttttgcctccaagacctgaaacagccacagaaacaagtcctctataaactgtatgtccctgacatccctttcccttcagcgcgttgccgccgccgctgccaaacttcaactgctttggactgaaaatgtcataagcgtgggtggtgccttcaatgtgttactgttgtttaatgacagtcttgtttcccaagtgcaacctgtgttcttttagccttccttcctcttctttttctgcagtagtagaagatgtttccatccttcctttgtaggtgagcccaccccataacaccctctgaggggctgctacaatgtcaggggtacccaagaacgaagacctccctactctctacactatcaaaattagtccttccattttctagccctctcaaacctgtcagatgtttcttggtcccgtaattcccatggtccctccaaattacctccccacatacttcatgtgttcatctcccatccagaatgtcctgaggttgtttttctggttggttctcataatccatagtccttggggtcccagcaaagtcagttttcctacaagttgtgtttgttttgtggaagcccaaagaagtggattgagagagaagagatttttatctaaggtggaaggtttttcaactagcccctaaaggtctttggtagttaattaacattcaacagacccacagcaactctggtgtcagaagctataaatggtctggccaaacaagactcagagtattttctgaaatcctgagctgcaaggttctgcctcacctgtctctccactctgacatcacgaaatcagcaaaaccagatatttattctcctcactcccagcagatacgaggacaccaacaatgcagttgatccctctgggcctgagtctcccatctgaaacatggggaattggggtaggtcaagctttttgaaactgcaaaacctctacctgtttttaaaaatgagatcttttgaccaggcacagtggctcacacctaaaatcccagcactttgggaggctgaagcaggtggatcatctgaggtcaggagtttgagatcagcctggtcaacatggtgaaaccccgtctctactaaaaatacaaacattagctgggcatggtggtgggtgcctgtaatcccaactactcgagaggctgaggcaggagaatcgcttaaacttgggaggttgcagtgagctgagaccacaccactgccctctagcctgggtgacggagtgagactatctcaaaaaaaaaaaaaaaaagaaaaaaaaagagatctttcaaagaacgcataataggagatctccatgtataaaaaggtaccatgctgtacaaagctggggtcagagatttagtgcccaccttctcagcctccttgggaagaccccagagcttcccagagtcaagtaaataccactgggcatggtcagagtttccttgacgttaatgagctatgtacctgcaacacactttggcatctctgtatatcaccttcacaatatttgtatctaaattgattcattttaatgcattttgtttttaaaatgaaaacttcctgtcttcatcacaaatttaaaaaaaatcatcagttgccataaatagaaagcaaacataaaaataagtacaaaggaaacaagcagcgatgattaaattccagctggagtctgttgtctgtgagtctgaactaaagcctggggttctttctttctctctccatctctctgtttctgtttctctctctctcttaaaatgatatcatcaggtattaaataattgttaaaaataccagcacccaatgaagactttctctttgtactaataagatggaccaaaaagtaaatgaaaggggaatcatttcctatgcaagtcagtgttgaacaatgctgtagctatgtactgcctatgatcattgtgcatacactaggggtgcatagcccacacttcagaaaaccctgggttgacttatctgtgaggctctttccagctcaaagtttccataattcttatctcccttttacctcgtggttgctctttgcccccagtccacttcgtcccacccttatctcaactctgattaagagtctttcttggcctctaaatctgtagtattgtattccttctgcatgctccttctcctctgaataaacttcatcaattgaactgggctccttggggtctgcagttgtaattttggcagcaaaggtgcagactggtcattaagatgtagccacaatgatggcccaagaaggacacgtactttccaagtagtcctgtctaggatggaaagctcaggaagtgcttcatagtttattatcttccagttggttttgggagatgaactgaagagggaagtttggatagggaaggtctttttattcttttttttttaatgtatccatggagtatttattattattattattattattattattattattatactttaagttttagggtacatgtgcacaatgtgcaggttagttacatatgtatacacgtgtcatgctggtgtgctgcacccattaactcgtcatttagcattagctatatctcctaatgctatccctcccccctccccccaccccacaacagtccccagagtgtgatgttccccttcttgtgtccatgtgttctcattgttcaattcccatctatgagtgagaacatgcagtgtttggtttttttgtccttgcgatagtttactgagaatgatgatttccaatttcatccatgtccctacaaaggacatgaactcatcattttttatggctgcatagtattccatggtgtatatgtgccacattttcttaatccagtctatccttgttggacttttgggttggttccaagtctttgctattgtgaatagtgccgcaataaacatacgtgtgcatgtgtctttatagcagcatgatttatagtcctttgggtatatacccagtaatgggatggctgggtcaaatggtatttctagttctagatccctgaggaatcgccacactgacttccacaatggttgaactagtttacagtcccaccagcagtgtaaaagtgttcctatttctccacatcctctccagcacctgttgtttcctgactttttaatgattgccattctaactggcgtgagatggtatctcattgtggttttgatttgcatttctctgatggccagtgatgatgagcattttttcatgtgtcttttgactgcataaatgtcttttgagaagtgtctgttcatatccttcgcccactttttgatggggttgtttgtttttttcttgtaaatttgtttgagttcattgtagattctggatattagccctttgtcagatgagtaggttgcgaaaattttctcccattttgtaggttgcctgttcactctgatggtagtttcttttgctgtgcagaagctctttagtttaattagatcccatttgtcaattttggcttcctcttgggagggtagacagacctcacaatatggaaagacgggacaacctatggaactatctgtgacttccatgtaccaagacaaggacgctatagctagggtagtgagacctagaagagagaaaccagaacaaagcagacaggctgtcctcttcctaattccatgccctgacatcagcccctattttttgcctttagctgtcccccagtttccaacccaatgggaccagagtctgacttccctttgccctttcacagtgtctcagcctccatctgccttgggctccgcctggcctccccatctaactcttcccagttttttgtgtaaatggagcatattttatgtgcgaatattttagtaaccgtatgttctgcaagtaaacctgtgttaatacttgtcaacaactgcagagtttatgatacgaataattcttcctacaatgaagaaaaaaacacatttgtttgttttctaagaatgtttatttgtaaacatatgtattcactatattaatatgaatttcttacctggcaataaaactgattatatgtgaaaaaaaaaaaa

SEQ ID NO: 586 - DNA, 3766 bp, Homo sapiens
tctcttcagcgcacttggcgagctggtgaggtgagagggatactgcgagagggctaggggcggccagtccggggctgccggccaaggctaggcgctgccagcccgattctcctctgctctccacccccgcctcacccagtggccggccggacctgcaccccgcgcttgaccccgctcatcctccccccgcccggccgggcgcgctcctccccggccggcccctcggcgcgcggcgcgctggaggcgaacgcgggctgaggcgaacgcgggctgagccgagcgcagtggccgccgaccaccgagcgccccgcgccgctccctgcatgtgcggcccgcggcggctcgcagctcccggcagcagcctcggcagcttcggccgcgcctcgagaggcggccgcagaggctccagcggcggccgagcggccgagcccgggctgggagacaccatgcgccgcgtccttcggctgctcctcggttgcttcctcaccgagctgtgcgcccgcgtgtgccgggcgcaggagcgagcgggacacgggcagctggcgcaactgggcggcgtgttgctgctggcggggggcaaccgctccggggccgcctccggagaggccagcgagggcgctgaggcatcggacgcgcccccgacccgggcgcccacgccggacttctgccggggctacttcgatgtcatgggccagtgggacccgccgttcaactgcagctcgggcgacttcatcttctgctgcgggacttgtggcttccggttctgctgcacgtttaagaagcggcgactgaaccaaagcacctgcaccaactacgacacgccgctctggctcaacaccggcaagccccccgcccgcaaggacgaccccttgcacgaccccaccaaggacaagaccaacctgatcgtctacatcatctgcggggtggtggccgtcatggtgctcgtgggcatcttcaccaagctggggctggagaaagcgcaccggccccaaagggagcacatgtccagggcccttgcggatgtcatgagaccacagggccactgcaacactgatcacatggagagagacctaaacatcgttgtccacgtccagcattatgagaacatggacacgagaacccccataaataatcttcatgccacccagatgaacaacgcagtgcccacctctcctctgctccagcagatgggccatccacattcgtacccgaacctgggccagatctccaacccctatgaacagcagccaccaggaaaagagctcaacaagtacgcctccttaaaggcagtcgctgacaaggtcaatgacgacttctacaccaagcgacggcacctggctgagctggctgccaaggggaacttacctctgcaccccgtaagagtggaggacgagccccgggccttcagccctgagcacggtcctgccaagcagaatggacagaagtcccgcaccaacaagatgcccccacatcccctggcctacacctctaccaccaactttaagggctgggaccccaacgagcagtccctccggcggcaggcttacagcaacaagggcaagcttggcacggccgagacaggctccagcgaccccttgggaactcgcccccagcactacccacccccacagccatacttcatcaccaacagcaaaacagaagtgactgtctgagctttcaccacagggagcaccctggagaccacactcaactgagagaggcaaaaaacaaccccgcccacaccctccccatcctcccctaatacatgcgtccacacactcactctcaacaagaaccaactctaaacctactggggacacagagtcgcgcttttcctaggtcatgcctgtaacgtgtcggcgggcagctgagaaagaccgaagcgtggacattcagcaatacagcaaaggggaaaatgaggcacactctttccacttcaggcccaagatggccaactcacatgcccaaaccgtggggctgagttttcttttcctcctaacttgaaactgaaatccatggtgacaaaatataaaagtagcacaatttagagaaattgtccatttgagcacatacactacttgccacgtgctgtctgtttctaggttcgaaagccagggtggaaatgggggtagagaatgagggaggacacaagagaagagtgtattctggaagaggagttgttctgggaggaatttgcccacattagaagcatttttctaattccaagaagtggtgacgtggacgtaaaattttgacgagcatgaaacagtaactggaccccaaccattctatttatagtacttttcatatcatccatgttgaaagcaaaaaacaacacaccctcaaactcacagaaagtaaatagaccctgaacccaccgacaatgatgggaaggaaaaaacaaaaaacaaaaaacattttagagaactcccataaggaccatgaccgtggaaatgggagggatgggcttttacggagagggtccggagagtatcaaataactttttaaaaagaggattaaaatgtaagcccactacaaaacagataaaaacggcaaattaggtgttttttttttttcaaaaatcttgaagacttgttgacattaacaacaacaaatccacagttggaaaagtccacaggagatcagatgaggatccagaagcctctgatttctgggttttgcctccaagacctgaaacagccacagaaacaagtcctctataaactgtatgtccctgacatccctttcccttcagcgcgttgccgccgccgctgccaaacttcaactgctttggactgaaaatgtcataagcgtgggtggtgccttcaatgtgttactgttgtttaatgacagtcttgtttcccaagtgcaacctgtgttcttttagccttccttcctcttctttttctgcagtagtagaagatgtttccatccttcctttgtaggtgagcccaccccataacaccctctgaggggctgctacaatgtcaggggtacccaagaacgaagacctccctactctctacactatcaaaattagtccttccattttctagccctctcaaacctgtcagatgtttcttggtcccgtaattcccatggtccctccaaattacctccccacatacttcatgtgttcatctcccatccagaatgtcctgaggttgtttttctggttggttctcataatccatagtccttggggtcccagcaaagtcagttttcctacaagttgtgtttgttttgtggaagcccaaagaagtggattgagagagaagagatttttatctaaggtggaaggtttttcaactagcccctaaaggtctttggtagttaattaacattcaacagacccacagcaactctggtgtcagaagctataaatggtctggccaaacaagactcagagtattttctgaaatcctgagctgcaaggttctgcctcacctgtctctccactctgacatcacgaaatcagcaaaaccagatatttattctcctcactcccagcagatacgaggacaccaacaatgcagttgatccctctgggcctgagtctcccatctgaaacatggggaattggggtaggtcaagctttttgaaactgcaaaacctctacctgtttttaaaaatgagatcttttgaccaggcacagtggctcacacctaaaatcccagcactttgggaggctgaagcaggtggatcatctgaggtcaggagtttgagatcagcctggtcaacatggtgaaaccccgtctctactaa

SEQ ID NO: 587 - DNA, 3014 bp, Homo sapiens
tctcttcagcgcacttggcgagctggtgaggtgagagggatactgcgagagggctaggggcggccagtccggggctgccggccaaggctaggcgctgccagcccgattctcctctgctctccacccccgcctcacccagtggccggccggacctgcaccccgcgcttgaccccgctcatcctccccccgcccggccgggcgcgctcctccccggccggcccctcggcgcgcggcgcgctggaggcgaacgcgggctgaggcgaacgcgggctgagccgagcgcagtggccgccgaccaccgagcgccccgcgccgctccctgcatgtgcggcccgcggcggctcgcagctcccggcagcagcctcggcagcttcggccgcgcctcgagaggcggccgcagaggctccagcggcggccgagcggccgagcccgggctgggagacaccatgcgccgcgtccttcggctgctcctcggttgcttcctcaccgagctgtgcgcccgcgtgtgccgggcgcaggagcgagcgggacacgggcagctggcgcaactgggcggcgtgttgctgctggcggggggcaaccgctccggggccgcctccggagaggccagcgagggcgctgaggcatcggacgcgcccccgacccgggcgcccacgccggacttctgccggggctacttcgatgtcatgggccagtgggacccgccgttcaactgcagctcgggcgacttcatcttctgctgcgggacttgtggcttccggttctgctgcacgtttaagaagcggcgactgaaccaaagcacctgcaccaactacgacacgccgctctggctcaacaccggcaagccccccgcccgcaaggacgaccccttgcacgaccccaccaaggacaagaccaacctgatcgtctacatcatctgcggggtggtggccgtcatggtgctcgtgggcatcttcaccaagctggggctggagaaagcgcaccggccccaaagggagcacatgtccagggcccttgcggatgtcatgagaccacagggccactgcaacactgatcacatggagagagacctaaacatcgttgtccacgtccagcattatgagaacatggacacgagaacccccataaataatcttcatgccacccagatgaacaacgcagtgcccacctctcctctgctccagcagatgggccatccacattcgtacccgaacctgggccagatctccaacccctatgaacagcagccaccaggaaaagagctcaacaagtacgcctccttaaaggcagtcgagctggaacacccttcttctcctgcctttggacatcagaacttcagattctctggccttcagacttcaagacttgcactagtggccccctgggttctcaaggttttggccgcctcggttgagagttacaccatcggcttctttggttctgaggccgttggagttggactgagccatgctaccagcttccctgggtctccagcctgcagattgcctactgtgagatttagcctccataatcacgtaacagaatattggcatgtagcactcctcaaaacatagaaagcagaaacaaatcaattctgcctggaggacctccccgatctcaacacccagtggttttgacagaattgatatagaaatagaagcttcaaggtgggaactttttatttaatgcaaagtaatatacgatttaagaaactatatttgttgcatgttatgtatgtgtcagatagtgggttaagaagtgctttacatgaattataccgtttaatcttcaaaactacagtaagatgcagggattgatatatttatccaaccaatatttatgaattattagaactgttctaggtactgtggacctagccatgaattacaaggtactttctatccatggagttacagcctggtgagggagacctgtaacatcaaacaaataaataaaataaaaatagaagactgtgaacaaatctctgaagattattaaatcatctgatgtgataaagatagtgactattttagagcagctcactggggaaggcctctctgaggaggtgccttttaaggtaagaagtctgaatgacaagaataagacaaccatgtgaaaatcagggcatttcaggcaggggttacagtgagtgcaaaaggccttgaattgaaaagatcgtggtgagttgaaggaacagcaaaaaggtcctgtgtgtttggggagtgaagatgaaaggggatgaagctgtaggtactggtagggggacagtcataaacgactgggtaaaccaagctcaggagttttattccattctaagaggagtgctgtgatttgttttatattttacaaaatcaatctggctgttctttagtgaataaatagattatgggtaggggaaaagaatgaaagtaagaaaatgaattaggaagctttgcagccattcagaagatgaaaggacttggctgggatggagtgataggaaagatgaagggatggagatgaatttggactgtgttttggaggtggagttctcagagcttatttagggattggcttacaggcgatgagaaaaaggaatcaaggattgatgttagggttttgcctaaggaattatccccatgtcaaaaatgaggaaacatatatatgcttaatatatatcacatatatatgtttcacatatatatttatatatatatgaaacaattatatatgaaagagattatgaagtttgccaaaggtcatacaggtatcccatgactttcatttattatgtatttatttattcatttgacaaatatgtgtcaggcatagcagaaataggagtgatcaagacagtaatggtcactcatggaattgaaaccaactcaatagtcccatagaccaatagtccccaaccttttatggcaccagggaccggtttcatggaagacaatttttccacaaacccaggttgttgggggatggtttgggatgattcaagcatatcacatttattgcggattttatttctatta

SEQ ID NO: 588 - DNA, 2387 bp, Homo sapiens
tctcttcagcgcacttggcgagctggtgaggtgagagggatactgcgagagggctaggggcggccagtccggggctgccggccaaggctaggcgctgccagcccgattctcctctgctctccacccccgcctcacccagtggccggccggacctgcaccccgcgcttgaccccgctcatcctccccccgcccggccgggcgcgctcctccccggccggcccctcggcgcgcggcgcgctggaggcgaacgcgggctgaggcgaacgcgggctgagccgagcgcagtggccgccgaccaccgagcgccccgcgccgctccctgcatgtgcggcccgcggcggctcgcagctcccggcagcagcctcggcagcttcggccgcgcctcgagaggcggccgcagaggctccagcggcggccgagcggccgagcccgggctgggagacaccatgcgccgcgtccttcggctgctcctcggttgcttcctcaccgagctgtgcgcccgcgtgtgccgggcgcaggagcgagcgggacacgggcagctggcgcaactgggcggcgtgttgctgctggcggggggcaaccgctccggggccgcctccggagaggccagcgagggcgctgaggcatcggacgcgcccccgacccgggcgcccacgccggacttctgccggggctacttcgatgtcatgggccagtgggacccgccgttcaactgcagctcgggcgacttcatcttctgctgcgggacttgtggcttccggttctgctgcacgtttaagaagcggcgactgaaccaaagcacctgcaccaactacgacacgccgctctggctcaacaccggcaagccccccgcccgcaaggacgaccccttgcacgaccccaccaaggacaagaccaacctgatcgtctacatcatctgcggggtggtggccgtcatggtgctcgtgggcatcttcaccaagctggggctggagaaagcgcaccggccccaaagggagcacatgtccagggcccttgcggatgtcatgagaccacagggccactgcaacactgatcacatggagagagacctaaacatcgttgtccacgtccagcattatgagaacatggacacgagaacccccataaataatcttcatgccacccagatgaacaacgcagtgcccacctctcctctgctccagcagatgggccatccacattcgtacccgaacctgggccagatctccaacccctatgaacagcagccaccaggaaaagagctcaacaagtacgcctccttaaaggcagtcgagctggaacacccttcttctcctgcctttggacatcagaacttcagattctctggccttcagacttcaagacttgcactagtggccccctgggttctcaaggttttggccgcctcggttgagagttacaccatcggcttctttggttctgaggccgttggagttggactgagccatgctaccagcttccctgggtctccagcctgcagattgcctactgtgagatttagcctccataatcacgtaacagaatattggcatgtagcactcctcaaaacatagaaagcagaaacaaatcaattctgcctggaggacctccccgatctcaacacccagtggttttgacagaattgatatagaaatagaagcttcaagcaaccttacgatggaggcagaagaaggattctatggttggaaacctgccagactcacaggctacggagaagaaaggctaaatccaccagactgttggatgcacctaaaacaaattgccctccgtggcttggtttcttattaatatactcatagaaatgcacaagaactgaaagctcgatagggaaaccaaaaaataaaaattaaaaaaaaaaagctgtaaaccaatgtttcttaaaacatgctctgcagaacactcgtttggtggaacgtaaagtgttctttcatattaaaggagttgcgtgttaatcgtgtttctctgtcataggactctcattgcattaatatgtcagtttccattgtgaatttctcaggagagagaggcgagtctgtgatattcctcaaatgcatgaggtcatggaatctaagagcagaagagcattaggatagcagaacagctttgatagcacaacagctccttgcatgtggtggaaatcacaagttcagggggacattttactggctgtattgtcagtaggatgaatactacacgctgcatcttctgaactataatacggtatccctgagaaacaaaattagaggaaatattgatcacatctcaccatttccagctaaaactaagatgcagagtctgcaatgccccaaaataaatgtgctcattccctgaacacatggggcctttgtcttattttgtcctttgtc

SEQ ID NO: 589 - DNA, 3209 bp, Homo sapiens
tctcttcagcgcacttggcgagctggtgaggtgagagggatactgcgagagggctaggggcggccagtccggggctgccggccaaggctaggcgctgccagcccgattctcctctgctctccacccccgcctcacccagtggccggccggacctgcaccccgcgcttgaccccgctcatcctccccccgcccggccgggcgcgctcctccccggccggcccctcggcgcgcggcgcgctggaggcgaacgcgggctgaggcgaacgcgggctgagccgagcgcagtggccgccgaccaccgagcgccccgcgccgctccctgcatgtgcggcccgcggcggctcgcagctcccggcagcagcctcggcagcttcggccgcgcctcgagaggcggccgcagaggctccagcggcggccgagcggccgagcccgggctgggagacaccatgcgccgcgtccttcggctgctcctcggttgcttcctcaccgagctgtgcgcccgcgtgtgccgggcgcaggagcgagcgggacacgggcagctggcgcaactgggcggcgtgttgctgctggcggggggcaaccgctccggggccgcctccggagaggccagcgagggcgctgaggcatcggacgcgcccccgacccgggcgcccacgccggacttctgccggggctacttcgatgtcatgggccagtgggacccgccgttcaactgcagctcgggcgacttcatcttctgctgcgggacttgtggcttccggttctgctgcacgtttaagaagcggcgactgaaccaaagcacctgcaccaactacgacacgccgctctggctcaacaccggcaagccccccgcccgcaaggacgaccccttgcacgaccccaccaaggacaagaccaacctgatcgtctacatcatctgcggggtggtggccgtcatggtgctcgtgggcatcttcaccaagctggggctggagaaagcgcaccggccccaaagggagcacatgtccagggcccttgcggatgtcatgagaccacagggccactgcaacactgatcacatggagagagacctaaacatcgttgtccacgtccagcattatgagaacatggacacgagaacccccataaataatcttcatgccacccagatgaacaacgcagtgcccacctctcctctgctccagcagatgggccatccacattcgtacccgaacctgggccagatctccaacccctatgaacagcagccaccaggaaaagagctcaacaagtacgcctccttaaaggcagtcgagctggaacacccttcttctcctgcctttggacatcagaacttcagattctctggccttcagacttcaagacttgcactagtggccccctgggttctcaaggttttggccgcctcggttgagagttacaccatcggcttctttggttctgaggccgttggagttggactgagccatgctaccagcttccctgggtctccagcctgcagattgcctactgtgagatttagcctccataatcacgtgagccaattctcttaacaaatcacttctcatatctttctccttctacatatcttattggctttgtctctgtggagaaccctgattaatacagcttctaaactgataaatgctcacttatacccattgagttgagattgcttcctgtctagcctcaaggctctgtcctctgaaagccacgcttgggatcttcaggtaacagaatattggcatgtagcactcctcaaaacatagaaagcagaaacaaatcaattctgcctggaggacctccccgatctcaacacccagtggttttgacagaattgatatagaaatagaagcttcaaggtgggaactttttatttaatgcaaagtaatatacgatttaagaaactatatttgttgcatgttatgtatgtgtcagatagtgggttaagaagtgctttacatgaattataccgtttaatcttcaaaactacagtaagatgcagggattgatatatttatccaaccaatatttatgaattattagaactgttctaggtactgtggacctagccatgaattacaaggtactttctatccatggagttacagcctggtgagggagacctgtaacatcaaacaaataaataaaataaaaatagaagactgtgaacaaatctctgaagattattaaatcatctgatgtgataaagatagtgactattttagagcagctcactggggaaggcctctctgaggaggtgccttttaaggtaagaagtctgaatgacaagaataagacaaccatgtgaaaatcagggcatttcaggcaggggttacagtgagtgcaaaaggccttgaattgaaaagatcgtggtgagttgaaggaacagcaaaaaggtcctgtgtgtttggggagtgaagatgaaaggggatgaagctgtaggtactggtagggggacagtcataaacgactgggtaaaccaagctcaggagttttattccattctaagaggagtgctgtgatttgttttatattttacaaaatcaatctggctgttctttagtgaataaatagattatgggtaggggaaaagaatgaaagtaagaaaatgaattaggaagctttgcagccattcagaagatgaaaggacttggctgggatggagtgataggaaagatgaagggatggagatgaatttggactgtgttttggaggtggagttctcagagcttatttagggattggcttacaggcgatgagaaaaaggaatcaaggattgatgttagggttttgcctaaggaattatccccatgtcaaaaatgaggaaacatatatatgcttaatatatatcacatatatatgtttcacatatatatttatatatatatgaaacaattatatatgaaagagattatgaagtttgccaaaggtcatacaggtatcccatgactttcatttattatgtatttatttattcatttgacaaatatgtgtcaggcatagcagaaataggagtgatcaagacagtaatggtcactcatggaattgaaaccaactcaatagtcccatagaccaatagtccccaaccttttatggcaccagggaccggtttcatggaagacaatttttccacaaacccaggttgttgggggatggtttgggatgattcaagcatatcacatttattgcggattttatttctatta

SEQ ID NO: 590 - DNA, 2583 bp, Homo sapiens
tctcttcagcgcacttggcgagctggtgaggtgagagggatactgcgagagggctaggggcggccagtccggggctgccggccaaggctaggcgctgccagcccgattctcctctgctctccacccccgcctcacccagtggccggccggacctgcaccccgcgcttgaccccgctcatcctccccccgcccggccgggcgcgctcctccccggccggcccctcggcgcgcggcgcgctggaggcgaacgcgggctgaggcgaacgcgggctgagccgagcgcagtggccgccgaccaccgagcgccccgcgccgctccctgcatgtgcggcccgcggcggctcgcagctcccggcagcagcctcggcagcttcggccgcgcctcgagaggcggccgcagaggctccagcggcggccgagcggccgagcccgggctgggagacaccatgcgccgcgtccttcggctgctcctcggttgcttcctcaccgagctgtgcgcccgcgtgtgccgggcgcaggagcgagcgggacacgggcagctggcgcaactgggcggcgtgttgctgctggcggggggcaaccgctccggggccgcctccggagaggccagcgagggcgctgaggcatcggacgcgcccccgacccgggcgcccacgccggacttctgccggggctacttcgatgtcatgggccagtgggacccgccgttcaactgcagctcgggcgacttcatcttctgctgcgggacttgtggcttccggttctgctgcacgtttaagaagcggcgactgaaccaaagcacctgcaccaactacgacacgccgctctggctcaacaccggcaagccccccgcccgcaaggacgaccccttgcacgaccccaccaaggacaagaccaacctgatcgtctacatcatctgcggggtggtggccgtcatggtgctcgtgggcatcttcaccaagctggggctggagaaagcgcaccggccccaaagggagcacatgtccagggcccttgcggatgtcatgagaccacagggccactgcaacactgatcacatggagagagacctaaacatcgttgtccacgtccagcattatgagaacatggacacgagaacccccataaataatcttcatgccacccagatgaacaacgcagtgcccacctctcctctgctccagcagatgggccatccacattcgtacccgaacctgggccagatctccaacccctatgaacagcagccaccaggaaaagagctcaacaagtacgcctccttaaaggcagtcgagctggaacacccttcttctcctgcctttggacatcagaacttcagattctctggccttcagacttcaagacttgcactagtggccccctgggttctcaaggttttggccgcctcggttgagagttacaccatcggcttctttggttctgaggccgttggagttggactgagccatgctaccagcttccctgggtctccagcctgcagattgcctactgtgagatttagcctccataatcacgtgagccaattctcttaacaaatcacttctcatatctttctccttctacatatcttattggctttgtctctgtggagaaccctgattaatacagcttctaaactgataaatgctcacttatacccattgagttgagattgcttcctgtctagcctcaaggctctgtcctctgaaagccacgcttgggatcttcaggtaacagaatattggcatgtagcactcctcaaaacatagaaagcagaaacaaatcaattctgcctggaggacctccccgatctcaacacccagtggttttgacagaattgatatagaaatagaagcttcaagcaaccttacgatggaggcagaagaaggattctatggttggaaacctgccagactcacaggctacggagaagaaaggctaaatccaccagactgttggatgcacctaaaacaaattgccctccgtggcttggtttcttattaatatactcatagaaatgcacaagaactgaaagctcgatagggaaaccaaaaaataaaaattaaaaaaaaaaagctgtaaaccaatgtttcttaaaacatgctctgcagaacactcgtttggtggaacgtaaagtgttctttcatattaaaggagttgcgtgttaatcgtgtttctctgtcataggactctcattgcattaatatgtcagtttccattgtgaatttctcaggagagagaggcgagtctgtgatattcctcaaatgcatgaggtcatggaatctaagagcagaagagcattaggatagcagaacagctttgatagcacaacagctccttgcatgtggtggaaatcacaagttcagggggacattttactggctgtattgtcagtaggatgaatactacacgctgcatcttctgaactataatacggtatccctgagaaacaaaattagaggaaatattgatcacatctcaccatttccagctaaaactaagatgcagagtctgcaatgccccaaaataaatgtgctcattccctgaacacatggggcctttgtcttattttgtcctttgtct

SEQ ID NO: 591 - DNA, 7192 bp, Homo sapiens
gcacaagcccagcccgggcaagcggccgccacctgcccggcgccgcctccgcccgcccccaccgcggcgcaacttggatggagttggggtcctgagcgccggccccccacagccgccagcgcagagctcgtgccgccaccttcgttctgggacccctctctccgctgctcttcgctcccgcgatgggaaaagttggcgccggcggcggctcccaagcccggctgagcgcgctcctcgccggcgcggggctcttgatcctctgcgccccgggcgtctgcggcggcggctcctgctgcccctcgccgcaccccagctccgctccacgctcggcctcgacccctaggggcttttcccaccaggggcggccaggcagggctcctgccacgcccctgcccctcgtagtgcgtcccctgttctcagtggcccccggggaccgagcgctatccctggagcgggctcggggcactggggcatccatggcggttgctgcacgctccggccggaggagacggagcggagcggatcaggagaaggcagaacggggagagggcgcgagtcggagcccccggggagtgctaagagatggagggcagcaggagcctgggactcgggagcgggacccggacaaagccacccgcttccggatggaggagctgagactgaccagcaccacgtttgcgctgacgggagactcagcacacaaccaagccatggtccactggtctggccacaacagcagcgtgattctcattttgacaaagctctatgactataacctggggagcatcacagagagctcgctttggaggtcaaccgattatggaacaacctatgagaagctgaatgataaagttggtttgaaaaccattttgagctatctctatgtgtgtcctaccaacaagcgtaagataatgttactcacagacccggagattgagagcagtttattgatcagctcagatgaaggggcaacttatcaaaagtaccggctgaacttctacattcaaagcttgctttttcaccccaaacaagaagactggattctggcatacagtcaagaccaaaagttatacagctctgctgaatttgggagaagatggcagcttatccaagaaggggttgtaccaaacaggttctactggtctgtgatggggtcaaataaagaaccagaccttgtgcatcttgaggccagaactgtggatggtcattcacattatctaacttgccgaatgcagaactgtacagaggccaacaggaatcagccttttccaggctacattgacccagactctttgattgttcaggatcattatgtgtttgttcagctgacatcaggagggcggccacattactacgtgtcctaccgaaggaatgcatttgcccaaatgaagcttccgaaatatgctttgcccaaggacatgcatgttatcagcaccgatgagaatcaggtgttcgcagcggtccaagaatggaaccagaatgacacgtacaacctctacatctcagacacacgtggtgtctacttcaccctggccttggagaatgtccagagcagcagaggccctgagggcaacatcatgatcgacctctatgaggtagcagggataaagggaatgttcttggctaacaagaagattgacaaccaagtgaagactttcatcacatataacaaaggcagagactggcgtttgctgcaggcgccggacacggatctaaggggggaccccgtgcactgcttgctgccctattgctcactacaccttcacctgaaggtctctgagaatccctacacatcagggatcattgccagcaaagacacagctccaagcatcatagtggcatcaggtaatataggttctgaattgtcagacactgacatcagcatgtttgtctcttcagatgcagggaacacctggagacagatctttgaagaagagcacagtgttttgtacctggatcaaggtggagtcctggttgctatgaaacacacatctctcccaattcgacatctttggttgagttttgatgaagggagatcttggagcaaatacagtttcacatctattccactttttgtggatggggttctgggtgagcctggagaagagactctcatcatgacagtgtttggacacttcagccaccgctctgaatggcagctggtcaaagtagattacaagtccatttttgatagacggtgtgccgaagaggactacagaccttggcagctgcacagccagggggaagcatgtatcatgggagcaaaaaggatatataagaagcgaaaatcagagcggaagtgtatgcaaggaaaatatgcaggagctatggaatctgaaccctgtgtctgcactgaggctgattttgattgcgactatggttatgagcgacacagcaatggccagtgcctgccggcattttggttcaatccatcctctctgtcaaaggattgcagcttgggacagagttacctcaatagtactgggtacaggaaggtggtttccaataattgcactgatggcgtaagggaacagtacactgccaaaccgcagaagtgcccagggaaagccccgcgggggctgcggatagtcacggctgatggaaagctgacagcggaacaaggacacaacgtcactctcatggtgcaattagaagagggtgatgttcagcggacactcatccaagtggactttggcgatggtatcgcggtgtcttacgtcaatctcagctccatggaagatgggatcaaacacgtctatcagaacgtgggcattttccgtgtgaccgtgcaggtggacaacagtctgggttctgacagcgccgtcctgtacttacatgtaacttgtcccttggagcacgtgcacctgtctcttccctttgtcaccacaaagaacaaagaggtcaatgcgacggcagtgctgtggcccagccaagtgggcaccctcacttacgtgtggtggtacggaaacaacacggagcctttgatcaccttggagggaagcatatccttcagatttacttcagaaggaatgaataccatcacagtgcaggtctcagctgggaatgccatcctacaagacacaaagaccatcgcagtatatgaggaattccggtctcttcgcttgtccttttctccaaacctggatgactacaacccggacatccctgagtggaggagggacatcggtcgagtcatcaaaaaatccctggtggaagccacaggggttccaggccagcacatcctggtggcggtgctccctggcttacccaccactgctgaactctttgtcctaccctatcaggatccagctggagaaaacaaaaggtcaactgatgacctggagcagatatcagaattgctgatccacacgctcaaccaaaactcagtacacttcgagctgaagccaggagtccgagtccttgtccatgctgctcacttaacagcggcccccctggtggacctcactccaacccacagtggatctgccatgctgatgctgctctcagtggtgtttgtggggctggcagtgttcgtcatctacaagtttaaaaggaagtatttccatagttgctgagaatcaaagcacaaaagaaatccctacctatgtaaatgtttgaatggaggacgccagtaaaaaaacaaaaacaaaaacaaaacaaaacataaaatataaacaatcaaaatccaaacaaacaaacaaacactcactgcatcgggactttttaattcttcagacacagacaacaagggtttttagctttaagcctgtgcatgtggacaatactctgagaacatgtctggaggggcagtgtacaggtgctctattttaatggaaaacactcccctctccctctttcttcttctctctcttttttctgatcggtcgtgtttgtagaaaattcataacatatataggccaaggaaatctgcatgtatttttggaaatattcttggctctagatttatcagctattttagcattaaaggctgatgggtggattagctaccccagctcctttcataagacacaaagacgtgcacaggagtttgaaaccctgagctgtttctctgttccactttccatactgtcatttcccttctaagttagctttggtagctctgttggtcagcagtggccacaaggctgctttctgcactctctgtggccacaggaacaaagatgcgagttgaagatccctttgtgccggtagaataaggaaggaagggaggcagggaggcaaagcatgtcagaaacggaccttggtttcctgttcacctctttccaccatgattgcctccccttgcagctttccctactcctgccccaactgcagtaggaaatggaatcccattagttacccattgtcctgtcttcacatttgtttgtcatccatgtgtgaccatgatctgttgatatctttgaatctcttccctccaaaccccaagtaagttgtccttcaactgttctcagtttttcttcccaaacatattgctagattctggacattaaccctgacgtttcctaaatactggcctggcctgtgccgcccctgcccccactactcacaagtttctgagccctttgtcagttttgtacattcccaagcatgccagcttctgtgcccatggaccttgctgcatcctgcacagcagggttcagtttcatgtatctttgtcttttcctctagaacctgcctttttcaaatatccctgccttttcccacctggaaacatatactgtatgcgaaagagttgatatatgcaaagtaattcaaacctggccatgtactttggaaaagaaagcatagagatgaattgtggtgttctcacaccttaacgaaaatctcgtgcgatctgattccagaagattcttgtgagaaatgttttgaatgtgtgacaatttcgcagggcaatttcctcctgtgacggttgctgttacctggtatttccactctcacagtagaatagaaatgtttgtgaaataaaactgattttaactggaaggagaaacaggttaatggactttgtgtttaagagtgtcaaacagtctgagagaataaatgggggtcttgtcttacattagggtgagagtttgattatttaggatgatcccagtgatttcatgtgtgctctctgacctctgagtatcatagtatcattaaagtaaagatttaagtctgtataaaggaggagagttactgattggcaaaaaagattggcacaaagcatgaagaaaccccatttttcccagggtaatcatgaaagaaggctcagagaaagagggaaacaaaagcctgttcagcagaggcccctttagtattatggactgggcaaagcccactataaactataggagaaagaagttctgataaacctcttagtatgctcagcctccttctttgctatgtccctaagccaacagggtataacacaggccctggtgataatgagggtgtcctaaagatcctgatgtccatgacttcatgtagttcaggcacagaaagaatagcaaagctgctgtcagaagtttgtcaggcagagatgtttatggttgaggataccccatatgaatctgggaaatgggctaggcctgaggcagtcacctatttgtagaactcaattgatccccaacctgccaggcttcctatctcataggaaacatcctcattgatcctcttcagttggagtctcccaaatttaatgtggaagacaaagtgttggaaaatcaaaagaggctcactcaaaccagcacagggagtcctcagagttgcagttcaattcattttaattagaaaagtatgaaagaggtataacactcttattctagcacagtgccttgcctagagtagtagtatgaaaactatttgttgaagaaataaatgaatggaaagacatagggaagaatgggctgtaaatcctaattaaaaatagaggtcgacatgagatacctggcattttgggaagtgaccaaagatggccagctagagattcagcatctccaggatcctcatgtgcctctcctcaaagctccctcccatctgtaggagattagtgaggcaaggtgctgctcagagaggaggacctcattgttcttaggaccttggccagttgttctcaaagtgtggtacctggatcagcagtatcactatcacttgggctagttagagatccagattctggatccataccccatacctactgaattagaaactctaggggatgaatagtggtgttctctgttgctaagtgacagtgggcccagccacctattttaacaagccctcccagtgattgtgatacatactaaagtttgagaaccattgtactaggccattccagctgaatctcaaacagaaggcagtaatgagagcctacaaatgggagggacctaagtgcctacctactcgctaatcgcaggtgcaaacacacaaggagtttggtgggcttaaggtcagaggagtgtgtagggagggatgtatgtggaaggtaagattcagggcaagctaaaaatccgatactgcaacgttttccaaaatcccagaaggcaaactgtgcatgttctaccctgaaccacccaagcaacactttctaccttgccttatttttaattggattcactgtccaaaatgcagaggtttgctttgcttttttttcagaagttccaaacagcaactttgagagcagtggggtgcttggcagctgttctgtgttttccaggaatccaactgagcattgaaatctctcatttgccgacttatttttataggaagccaattaaaaaaaaaaaaagttttcttatagtattggaactacttctaattttaaaatgacttttttgatgtattttttgttaaatactatgtagtgtaatgtataattgctcttgtttattgcttttacaatcatatttattaaacagataatgtctctaaagtctttgcctcaggtatttttttttttaatcctaaacccttggtgttcattctaaatatagaagtgttgcatgtataggatttcataaaggctaattgcataagaaagagtaaacaccacaggcttgaggtttttggctgttttttactaacaaggcagaatgtatgtactacctgaattctacctgcatttcaattaactatacaatgtctgtttattaaattactttgatttaaaaattaaaaaaaaaaaaaaaaa

SEQ ID NO: 592 - DNA, 4259 bp, Homo sapiens
gcacaagcccagcccgggcaagcggccgccacctgcccggcgccgcctccgcccgcccccaccgcggcgcaacttggatggagttggggtcctgagcgccggccccccacagccgccagcgcagagctcgtgccgccaccttcgttctgggacccctctctccgctgctcttcgctcccgcgatgggaaaagttggcgccggcggcggctcccaagcccggctgagcgcgctcctcgccggcgcggggctcttgatcctctgcgccccgggcgtctgcggcggcggctcctgctgcccctcgccgcaccccagctccgctccacgctcggcctcgacccctaggggcttttcccaccaggggcggccaggcagggctcctgccacgcccctgcccctcgtagtgcgtcccctgttctcagtggcccccggggaccgagcgctatccctggagcgggctcggggcactggggcatccatggcggttgctgcacgctccggccggaggagacggagcggagcggatcaggagaaggcagaacggggagagggcgcgagtcggagcccccggggagtgctaagagatggagggcagcaggagcctgggactcgggagcgggacccggacaaagccacccgcttccggatggaggagctgagactgaccagcaccacgtttgcgctgacgggagactcagcacacaaccaagccatggtccactggtctggccacaacagcagcgtgattctcattttgacaaagctctatgactataacctggggagcatcacagagagctcgctttggaggtcaaccgattatggaacaacctatgagaagctgaatgataaagttggtttgaaaaccattttgagctatctctatgtgtgtcctaccaacaagcgtaagataatgttactcacagacccggagattgagagcagtttattgatcagctcagatgaaggggcaacttatcaaaagtaccggctgaacttctacattcaaagcttgctttttcaccccaaacaagaagactggattctggcatacagtcaagaccaaaagttatacagctctgctgaatttgggagaagatggcagcttatccaagaaggggttgtaccaaacaggttctactggtctgtgatggggtcaaataaagaaccagaccttgtgcatcttgaggccagaactgtggatggtcattcacattatctaacttgccgaatgcagaactgtacagaggccaacaggaatcagccttttccaggctacattgacccagactctttgattgttcaggatcattatgtgtttgttcagctgacatcaggagggcggccacattactacgtgtcctaccgaaggaatgcatttgcccaaatgaagcttccgaaatatgctttgcccaaggacatgcatgttatcagcaccgatgagaatcaggtgttcgcagcggtccaagaatggaaccagaatgacacgtacaacctctacatctcagacacacgtggtgtctacttcaccctggccttggagaatgtccagagcagcagaggccctgagggcaacatcatgatcgacctctatgaggtagcagggataaagggaatgttcttggctaacaagaagattgacaaccaagtgaagactttcatcacatataacaaaggcagagactggcgtttgctgcaggcgccggacacggatctaaggggggaccccgtgcactgcttgctgccctattgctcactacaccttcacctgaaggtctctgagaatccctacacatcagggatcattgccagcaaagacacagctccaagcatcatagtggcatcaggtaatataggttctgaattgtcagacactgacatcagcatgtttgtctcttcagatgcagggaacacctggagacagatctttgaagaagagcacagtgttttgtacctggatcaaggtggagtcctggttgctatgaaacacacatctctcccaattcgacatctttggttgagttttgatgaagggagatcttggagcaaatacagtttcacatctattccactttttgtggatggggttctgggtgagcctggagaagagactctcatcatgacagtgtttggacacttcagccaccgctctgaatggcagctggtcaaagtagattacaagtccatttttgatagacggtgtgccgaagaggactacagaccttggcagctgcacagccagggggaagcatgtatcatgggagcaaaaaggatatataagaagcgaaaatcagagcggaagtgtatgcaaggaaaatatgcaggagctatggaatctgaaccctgtgtctgcactgaggctgattttgattgcgactatggttatgagcgacacagcaatggccagtgcctgccggcattttggttcaatccatcctctctgtcaaaggattgcagcttgggacagagttacctcaatagtactgggtacaggaaggtggtttccaataattgcactgatggcgtaagggaacagtacactgccaaaccgcagaagtgcccagggaaagccccgcgggggctgcggatagtcacggctgatggaaagctgacagcggaacaaggacacaacgtcactctcatggtgcaattagaagagggtgatgttcagcggacactcatccaagtggactttggcgatggtatcgcggtgtcttacgtcaatctcagctccatggaagatgggatcaaacacgtctatcagaacgtgggcattttccgtgtgaccgtgcaggtggacaacagtctgggttctgacagcgccgtcctgtacttacatgtaacttgtcccttggagcacgtgcacctgtctcttccctttgtcaccacaaagaacaaagaggtcaatgcgacggcagtgctgtggcccagccaagtgggcaccctcacttacgtgtggtggtacggaaacaacacggagcctttgatcaccttggagggaagcatatccttcagatttacttcagaaggaatgaataccatcacagtgcaggtctcagctgggaatgccatcctacaagacacaaagaccatcgcagtatatgaggaattccggtctcttcgcttgtccttttctccaaacctggatgactacaacccggacatccctgagtggaggagggacatcggtcgagtcatcaaaaaatccctggtggaagccacaggggttccaggccagcacatcctggtggcggtgctccctggcttacccaccactgctgaactctttgtcctaccctatcaggatccagctggagaaaacaaaaggtcaactgatgacctggagcagatatcagaattgctgatccacacgctcaaccaaaactcagtacacttcgagctgaagccaggagtccgagtccttgtccatgctgctcacttaacagcggcccccctggtggacctcactccaacccacagtggatctgccatgctgatgctgctctcagtggtgtttgtggggctggcagtgttcgtcatctacaagtttaaaaggtgcgtgtccctctatccacgttcccccacccctgacctcttccttctccctgacaggttcagaagcatgtgttacagtgatgtgcatagcagtgatggtttctattaatattttaggaagatcccggggattaatgtttatgcccagatgcagaatgagaaagaacaagagatgatcagtccagtcagtcactctgaaagcaggcccaatgtccctcagactgaactaaggaggcctggccagcttatagatgagaaggtggaatcccagctcataggtaaatgattcccagtagccaccagctgttcggctgagtaggcaatggctgactctctctctaacccctttctggcttgacataaccactttcttttgctctaacacccctgagagaaacagctaagatggctttttccctgcttcctctgattgggatgggggaaaaacaaacaaacctcttgcttctatctagtttttttctctcattagtttattcctccttttgcaaaaccctccctaaaatattgggcttaaaatgttaaaatgttatatgtttatgggcaaagagcaaagcatttgctttaatagtatataagaaggagaggcctcagaggctaaggctggtggaccagagggctgggcagggtttgcaggacatggtatgtattgactagaatgaaacatggtagcctcaactggatacag

SEQ ID NO: 593 - DNA, 7623 bp, Homo sapiens
gcacaagcccagcccgggcaagcggccgccacctgcccggcgccgcctccgcccgcccccaccgcggcgcaacttggatggagttggggtcctgagcgccggccccccacagccgccagcgcagagctcgtgccgccaccttcgttctgggacccctctctccgctgctcttcgctcccgcgatgggaaaagttggcgccggcggcggctcccaagcccggctgagcgcgctcctcgccggcgcggggctcttgatcctctgcgccccgggcgtctgcggcggcggctcctgctgcccctcgccgcaccccagctccgctccacgctcggcctcgacccctaggggcttttcccaccaggggcggccaggcagggctcctgccacgcccctgcccctcgtagtgcgtcccctgttctcagtggcccccggggaccgagcgctatccctggagcgggctcggggcactggggcatccatggcggttgctgcacgctccggccggaggagacggagcggagcggatcaggagaaggcagaacggggagagggcgcgagtcggagcccccggggagtgctaagagatggagggcagcaggagcctgggactcgggagcgggacccggacaaagccacccgcttccggatggaggagctgagactgaccagcaccacgtttgcgctgacgggagactcagcacacaaccaagccatggtccactggtctggccacaacagcagcgtgattctcattttgacaaagctctatgactataacctggggagcatcacagagagctcgctttggaggtcaaccgattatggaacaacctatgagaagctgaatgataaagttggtttgaaaaccattttgagctatctctatgtgtgtcctaccaacaagcgtaagataatgttactcacagacccggagattgagagcagtttattgatcagctcagatgaaggggcaacttatcaaaagtaccggctgaacttctacattcaaagcttgctttttcaccccaaacaagaagactggattctggcatacagtcaagaccaaaagttatacagctctgctgaatttgggagaagatggcagcttatccaagaaggggttgtaccaaacaggttctactggtctgtgatggggtcaaataaagaaccagaccttgtgcatcttgaggccagaactgtggatggtcattcacattatctaacttgccgaatgcagaactgtacagaggccaacaggaatcagccttttccaggctacattgacccagactctttgattgttcaggatcattatgtgtttgttcagctgacatcaggagggcggccacattactacgtgtcctaccgaaggaatgcatttgcccaaatgaagcttccgaaatatgctttgcccaaggacatgcatgttatcagcaccgatgagaatcaggtgttcgcagcggtccaagaatggaaccagaatgacacgtacaacctctacatctcagacacacgtggtgtctacttcaccctggccttggagaatgtccagagcagcagaggccctgagggcaacatcatgatcgacctctatgaggtagcagggataaagggaatgttcttggctaacaagaagattgacaaccaagtgaagactttcatcacatataacaaaggcagagactggcgtttgctgcaggcgccggacacggatctaaggggggaccccgtgcactgcttgctgccctattgctcactacaccttcacctgaaggtctctgagaatccctacacatcagggatcattgccagcaaagacacagctccaagcatcatagtggcatcaggtaatataggttctgaattgtcagacactgacatcagcatgtttgtctcttcagatgcagggaacacctggagacagatctttgaagaagagcacagtgttttgtacctggatcaaggtggagtcctggttgctatgaaacacacatctctcccaattcgacatctttggttgagttttgatgaagggagatcttggagcaaatacagtttcacatctattccactttttgtggatggggttctgggtgagcctggagaagagactctcatcatgacagtgtttggacacttcagccaccgctctgaatggcagctggtcaaagtagattacaagtccatttttgatagacggtgtgccgaagaggactacagaccttggcagctgcacagccagggggaagcatgtatcatgggagcaaaaaggatatataagaagcgaaaatcagagcggaagtgtatgcaaggaaaatatgcaggagctatggaatctgaaccctgtgtctgcactgaggctgattttgattgcgactatggttatgagcgacacagcaatggccagtgcctgccggcattttggttcaatccatcctctctgtcaaaggattgcagcttgggacagagttacctcaatagtactgggtacaggaaggtggtttccaataattgcactgatggcgtaagggaacagtacactgccaaaccgcagaagtgcccagggaaagccccgcgggggctgcggatagtcacggctgatggaaagctgacagcggaacaaggacacaacgtcactctcatggtgcaattagaagagggtgatgttcagcggacactcatccaagtggactttggcgatggtatcgcggtgtcttacgtcaatctcagctccatggaagatgggatcaaacacgtctatcagaacgtgggcattttccgtgtgaccgtgcaggtggacaacagtctgggttctgacagcgccgtcctgtacttacatgtaacttgtcccttggagcacgtgcacctgtctcttccctttgtcaccacaaagaacaaagaggtcaatgcgacggcagtgctgtggcccagccaagtgggcaccctcacttacgtgtggtggtacggaaacaacacggagcctttgatcaccttggagggaagcatatccttcagatttacttcagaaggaatgaataccatcacagtgcaggtctcagctgggaatgccatcctacaagacacaaagaccatcgcagtatatgaggaattccggtctcttcgcttgtccttttctccaaacctggatgactacaacccggacatccctgagtggaggagggacatcggtcgagtcatcaaaaaatccctggtggaagccacaggggttccaggccagcacatcctggtggcggtgctccctggcttacccaccactgctgaactctttgtcctaccctatcaggatccagctggagaaaacaaaaggtcaactgatgacctggagcagatatcagaattgctgatccacacgctcaaccaaaactcagtacacttcgagctgaagccaggagtccgagtccttgtccatgctgctcacttaacagcggcccccctggtggacctcactccaacccacagtggatctgccatgctgatgctgctctcagtggtgtttgtggggctggcagtgttcgtcatctacaagtttaaaaggaagatcccggggattaatgtttatgcccagatgcagaatgagaaagaacaagagatgatcagtccagtcagtcactctgaaagcaggcccaatgtccctcagactgaactaaggaggcctggccagcttatagatgagaaggtggaatcccagctcataggagagtagctttaccctcccctccctccccttctactcaacctggtgactcatctctccgattgcaaagagcaagacacgccactccgccttcaacgccaaagcggggatctgctggggcacagtatgcaatttaaggaaaacccccaaaggctacaggcgacctgctgatcaggaaagaatttcgctcttgtcaagtacatcatccttcatgaccactaactttgtgttttttttctttcctttgttgttctgtttcctattttgccaggaagtatttccatagttgctgagaatcaaagcacaaaagaaatccctacctatgtaaatgtttgaatggaggacgccagtaaaaaaacaaaaacaaaaacaaaacaaaacataaaatataaacaatcaaaatccaaacaaacaaacaaacactcactgcatcgggactttttaattcttcagacacagacaacaagggtttttagctttaagcctgtgcatgtggacaatactctgagaacatgtctggaggggcagtgtacaggtgctctattttaatggaaaacactcccctctccctctttcttcttctctctcttttttctgatcggtcgtgtttgtagaaaattcataacatatataggccaaggaaatctgcatgtatttttggaaatattcttggctctagatttatcagctattttagcattaaaggctgatgggtggattagctaccccagctcctttcataagacacaaagacgtgcacaggagtttgaaaccctgagctgtttctctgttccactttccatactgtcatttcccttctaagttagctttggtagctctgttggtcagcagtggccacaaggctgctttctgcactctctgtggccacaggaacaaagatgcgagttgaagatccctttgtgccggtagaataaggaaggaagggaggcagggaggcaaagcatgtcagaaacggaccttggtttcctgttcacctctttccaccatgattgcctccccttgcagctttccctactcctgccccaactgcagtaggaaatggaatcccattagttacccattgtcctgtcttcacatttgtttgtcatccatgtgtgaccatgatctgttgatatctttgaatctcttccctccaaaccccaagtaagttgtccttcaactgttctcagtttttcttcccaaacatattgctagattctggacattaaccctgacgtttcctaaatactggcctggcctgtgccgcccctgcccccactactcacaagtttctgagccctttgtcagttttgtacattcccaagcatgccagcttctgtgcccatggaccttgctgcatcctgcacagcagggttcagtttcatgtatctttgtcttttcctctagaacctgcctttttcaaatatccctgccttttcccacctggaaacatatactgtatgcgaaagagttgatatatgcaaagtaattcaaacctggccatgtactttggaaaagaaagcatagagatgaattgtggtgttctcacaccttaacgaaaatctcgtgcgatctgattccagaagattcttgtgagaaatgttttgaatgtgtgacaatttcgcagggcaatttcctcctgtgacggttgctgttacctggtatttccactctcacagtagaatagaaatgtttgtgaaataaaactgattttaactggaaggagaaacaggttaatggactttgtgtttaagagtgtcaaacagtctgagagaataaatgggggtcttgtcttacattagggtgagagtttgattatttaggatgatcccagtgatttcatgtgtgctctctgacctctgagtatcatagtatcattaaagtaaagatttaagtctgtataaaggaggagagttactgattggcaaaaaagattggcacaaagcatgaagaaaccccatttttcccagggtaatcatgaaagaaggctcagagaaagagggaaacaaaagcctgttcagcagaggcccctttagtattatggactgggcaaagcccactataaactataggagaaagaagttctgataaacctcttagtatgctcagcctccttctttgctatgtccctaagccaacagggtataacacaggccctggtgataatgagggtgtcctaaagatcctgatgtccatgacttcatgtagttcaggcacagaaagaatagcaaagctgctgtcagaagtttgtcaggcagagatgtttatggttgaggataccccatatgaatctgggaaatgggctaggcctgaggcagtcacctatttgtagaactcaattgatccccaacctgccaggcttcctatctcataggaaacatcctcattgatcctcttcagttggagtctcccaaatttaatgtggaagacaaagtgttggaaaatcaaaagaggctcactcaaaccagcacagggagtcctcagagttgcagttcaattcattttaattagaaaagtatgaaagaggtataacactcttattctagcacagtgccttgcctagagtagtagtatgaaaactatttgttgaagaaataaatgaatggaaagacatagggaagaatgggctgtaaatcctaattaaaaatagaggtcgacatgagatacctggcattttgggaagtgaccaaagatggccagctagagattcagcatctccaggatcctcatgtgcctctcctcaaagctccctcccatctgtaggagattagtgaggcaaggtgctgctcagagaggaggacctcattgttcttaggaccttggccagttgttctcaaagtgtggtacctggatcagcagtatcactatcacttgggctagttagagatccagattctggatccataccccatacctactgaattagaaactctaggggatgaatagtggtgttctctgttgctaagtgacagtgggcccagccacctattttaacaagccctcccagtgattgtgatacatactaaagtttgagaaccattgtactaggccattccagctgaatctcaaacagaaggcagtaatgagagcctacaaatgggagggacctaagtgcctacctactcgctaatcgcaggtgcaaacacacaaggagtttggtgggcttaaggtcagaggagtgtgtagggagggatgtatgtggaaggtaagattcagggcaagctaaaaatccgatactgcaacgttttccaaaatcccagaaggcaaactgtgcatgttctaccctgaaccacccaagcaacactttctaccttgccttatttttaattggattcactgtccaaaatgcagaggtttgctttgcttttttttcagaagttccaaacagcaactttgagagcagtggggtgcttggcagctgttctgtgttttccaggaatccaactgagcattgaaatctctcatttgccgacttatttttataggaagccaattaaaaaaaaaaaaagttttcttatagtattggaactacttctaattttaaaatgacttttttgatgtattttttgttaaatactatgtagtgtaatgtataattgctcttgtttattgcttttacaatcatatttattaaacagataatgtctctaaagtctttgcctcaggtatttttttttttaatcctaaacccttggtgttcattctaaatatagaagtgttgcatgtataggatttcataaaggctaattgcataagaaagagtaaacaccacaggcttgaggtttttggctgttttttactaacaaggcagaatgtatgtactacctgaattctacctgcatttcaattaactatacaatgtctgtttattaaattactttgatttaaaaattaaaaaaaaaaaaaaaaa

SEQ ID NO: 594 - DNA, 7353 bp, Homo sapiens
gcacaagcccagcccgggcaagcggccgccacctgcccggcgccgcctccgcccgcccccaccgcggcgcaacttggatggagttggggtcctgagcgccggccccccacagccgccagcgcagagctcgtgccgccaccttcgttctgggacccctctctccgctgctcttcgctcccgcgatgggaaaagttggcgccggcggcggctcccaagcccggctgagcgcgctcctcgccggcgcggggctcttgatcctctgcgccccgggcgtctgcggcggcggctcctgctgcccctcgccgcaccccagctccgctccacgctcggcctcgacccctaggggcttttcccaccaggggcggccaggcagggctcctgccacgcccctgcccctcgtagtgcgtcccctgttctcagtggcccccggggaccgagcgctatccctggagcgggctcggggcactggggcatccatggcggttgctgcacgctccggccggaggagacggagcggagcggatcaggagaaggcagaacggggagagggcgcgagtcggagcccccggggagtgctaagagatggagggcagcaggagcctgggactcgggagcgggacccggacaaagccacccgcttccggatggaggagctgagactgaccagcaccacgtttgcgctgacgggagactcagcacacaaccaagccatggtccactggtctggccacaacagcagcgtgattctcattttgacaaagctctatgactataacctggggagcatcacagagagctcgctttggaggtcaaccgattatggaacaacctatgagaagctgaatgataaagttggtttgaaaaccattttgagctatctctatgtgtgtcctaccaacaagcgtaagataatgttactcacagacccggagattgagagcagtttattgatcagctcagatgaaggggcaacttatcaaaagtaccggctgaacttctacattcaaagcttgctttttcaccccaaacaagaagactggattctggcatacagtcaagaccaaaagttatacagctctgctgaatttgggagaagatggcagcttatccaagaaggggttgtaccaaacaggttctactggtctgtgatggggtcaaataaagaaccagaccttgtgcatcttgaggccagaactgtggatggtcattcacattatctaacttgccgaatgcagaactgtacagaggccaacaggaatcagccttttccaggctacattgacccagactctttgattgttcaggatcattatgtgtttgttcagctgacatcaggagggcggccacattactacgtgtcctaccgaaggaatgcatttgcccaaatgaagcttccgaaatatgctttgcccaaggacatgcatgttatcagcaccgatgagaatcaggtgttcgcagcggtccaagaatggaaccagaatgacacgtacaacctctacatctcagacacacgtggtgtctacttcaccctggccttggagaatgtccagagcagcagaggccctgagggcaacatcatgatcgacctctatgaggtagcagggataaagggaatgttcttggctaacaagaagattgacaaccaagtgaagactttcatcacatataacaaaggcagagactggcgtttgctgcaggcgccggacacggatctaaggggggaccccgtgcactgcttgctgccctattgctcactacaccttcacctgaaggtctctgagaatccctacacatcagggatcattgccagcaaagacacagctccaagcatcatagtggcatcaggtaatataggttctgaattgtcagacactgacatcagcatgtttgtctcttcagatgcagggaacacctggagacagatctttgaagaagagcacagtgttttgtacctggatcaaggtggagtcctggttgctatgaaacacacatctctcccaattcgacatctttggttgagttttgatgaagggagatcttggagcaaatacagtttcacatctattccactttttgtggatggggttctgggtgagcctggagaagagactctcatcatgacagtgtttggacacttcagccaccgctctgaatggcagctggtcaaagtagattacaagtccatttttgatagacggtgtgccgaagaggactacagaccttggcagctgcacagccagggggaagcatgtatcatgggagcaaaaaggatatataagaagcgaaaatcagagcggaagtgtatgcaaggaaaatatgcaggagctatggaatctgaaccctgtgtctgcactgaggctgattttgattgcgactatggttatgagcgacacagcaatggccagtgcctgccggcattttggttcaatccatcctctctgtcaaaggattgcagcttgggacagagttacctcaatagtactgggtacaggaaggtggtttccaataattgcactgatggcgtaagggaacagtacactgccaaaccgcagaagtgcccagggaaagccccgcgggggctgcggatagtcacggctgatggaaagctgacagcggaacaaggacacaacgtcactctcatggtgcaattagaagagggtgatgttcagcggacactcatccaagtggactttggcgatggtatcgcggtgtcttacgtcaatctcagctccatggaagatgggatcaaacacgtctatcagaacgtgggcattttccgtgtgaccgtgcaggtggacaacagtctgggttctgacagcgccgtcctgtacttacatgtaacttgtcccttggagcacgtgcacctgtctcttccctttgtcaccacaaagaacaaagaggtcaatgcgacggcagtgctgtggcccagccaagtgggcaccctcacttacgtgtggtggtacggaaacaacacggagcctttgatcaccttggagggaagcatatccttcagatttacttcagaaggaatgaataccatcacagtgcaggtctcagctgggaatgccatcctacaagacacaaagaccatcgcagtatatgaggaattccggtctcttcgcttgtccttttctccaaacctggatgactacaacccggacatccctgagtggaggagggacatcggtcgagtcatcaaaaaatccctggtggaagccacaggggttccaggccagcacatcctggtggcggtgctccctggcttacccaccactgctgaactctttgtcctaccctatcaggatccagctggagaaaacaaaaggtcaactgatgacctggagcagatatcagaattgctgatccacacgctcaaccaaaactcagtacacttcgagctgaagccaggagtccgagtccttgtccatgctgctcacttaacagcggcccccctggtggacctcactccaacccacagtggatctgccatgctgatgctgctctcagtggtgtttgtggggctggcagtgttcgtcatctacaagtttaaaaggaagatcccggggattaatgtttatgcccagatgcagaatgagaaagaacaagagatgatcagtccagtcagtcactctgaaagcaggcccaatgtccctcagactgaactaaggaggcctggccagcttatagatgagaaggtggaatcccagctcataggaagtatttccatagttgctgagaatcaaagcacaaaagaaatccctacctatgtaaatgtttgaatggaggacgccagtaaaaaaacaaaaacaaaaacaaaacaaaacataaaatataaacaatcaaaatccaaacaaacaaacaaacactcactgcatcgggactttttaattcttcagacacagacaacaagggtttttagctttaagcctgtgcatgtggacaatactctgagaacatgtctggaggggcagtgtacaggtgctctattttaatggaaaacactcccctctccctctttcttcttctctctcttttttctgatcggtcgtgtttgtagaaaattcataacatatataggccaaggaaatctgcatgtatttttggaaatattcttggctctagatttatcagctattttagcattaaaggctgatgggtggattagctaccccagctcctttcataagacacaaagacgtgcacaggagtttgaaaccctgagctgtttctctgttccactttccatactgtcatttcccttctaagttagctttggtagctctgttggtcagcagtggccacaaggctgctttctgcactctctgtggccacaggaacaaagatgcgagttgaagatccctttgtgccggtagaataaggaaggaagggaggcagggaggcaaagcatgtcagaaacggaccttggtttcctgttcacctctttccaccatgattgcctccccttgcagctttccctactcctgccccaactgcagtaggaaatggaatcccattagttacccattgtcctgtcttcacatttgtttgtcatccatgtgtgaccatgatctgttgatatctttgaatctcttccctccaaaccccaagtaagttgtccttcaactgttctcagtttttcttcccaaacatattgctagattctggacattaaccctgacgtttcctaaatactggcctggcctgtgccgcccctgcccccactactcacaagtttctgagccctttgtcagttttgtacattcccaagcatgccagcttctgtgcccatggaccttgctgcatcctgcacagcagggttcagtttcatgtatctttgtcttttcctctagaacctgcctttttcaaatatccctgccttttcccacctggaaacatatactgtatgcgaaagagttgatatatgcaaagtaattcaaacctggccatgtactttggaaaagaaagcatagagatgaattgtggtgttctcacaccttaacgaaaatctcgtgcgatctgattccagaagattcttgtgagaaatgttttgaatgtgtgacaatttcgcagggcaatttcctcctgtgacggttgctgttacctggtatttccactctcacagtagaatagaaatgtttgtgaaataaaactgattttaactggaaggagaaacaggttaatggactttgtgtttaagagtgtcaaacagtctgagagaataaatgggggtcttgtcttacattagggtgagagtttgattatttaggatgatcccagtgatttcatgtgtgctctctgacctctgagtatcatagtatcattaaagtaaagatttaagtctgtataaaggaggagagttactgattggcaaaaaagattggcacaaagcatgaagaaaccccatttttcccagggtaatcatgaaagaaggctcagagaaagagggaaacaaaagcctgttcagcagaggcccctttagtattatggactgggcaaagcccactataaactataggagaaagaagttctgataaacctcttagtatgctcagcctccttctttgctatgtccctaagccaacagggtataacacaggccctggtgataatgagggtgtcctaaagatcctgatgtccatgacttcatgtagttcaggcacagaaagaatagcaaagctgctgtcagaagtttgtcaggcagagatgtttatggttgaggataccccatatgaatctgggaaatgggctaggcctgaggcagtcacctatttgtagaactcaattgatccccaacctgccaggcttcctatctcataggaaacatcctcattgatcctcttcagttggagtctcccaaatttaatgtggaagacaaagtgttggaaaatcaaaagaggctcactcaaaccagcacagggagtcctcagagttgcagttcaattcattttaattagaaaagtatgaaagaggtataacactcttattctagcacagtgccttgcctagagtagtagtatgaaaactatttgttgaagaaataaatgaatggaaagacatagggaagaatgggctgtaaatcctaattaaaaatagaggtcgacatgagatacctggcattttgggaagtgaccaaagatggccagctagagattcagcatctccaggatcctcatgtgcctctcctcaaagctccctcccatctgtaggagattagtgaggcaaggtgctgctcagagaggaggacctcattgttcttaggaccttggccagttgttctcaaagtgtggtacctggatcagcagtatcactatcacttgggctagttagagatccagattctggatccataccccatacctactgaattagaaactctaggggatgaatagtggtgttctctgttgctaagtgacagtgggcccagccacctattttaacaagccctcccagtgattgtgatacatactaaagtttgagaaccattgtactaggccattccagctgaatctcaaacagaaggcagtaatgagagcctacaaatgggagggacctaagtgcctacctactcgctaatcgcaggtgcaaacacacaaggagtttggtgggcttaaggtcagaggagtgtgtagggagggatgtatgtggaaggtaagattcagggcaagctaaaaatccgatactgcaacgttttccaaaatcccagaaggcaaactgtgcatgttctaccctgaaccacccaagcaacactttctaccttgccttatttttaattggattcactgtccaaaatgcagaggtttgctttgcttttttttcagaagttccaaacagcaactttgagagcagtggggtgcttggcagctgttctgtgttttccaggaatccaactgagcattgaaatctctcatttgccgacttatttttataggaagccaattaaaaaaaaaaaaagttttcttatagtattggaactacttctaattttaaaatgacttttttgatgtattttttgttaaatactatgtagtgtaatgtataattgctcttgtttattgcttttacaatcatatttattaaacagataatgtctctaaagtctttgcctcaggtatttttttttttaatcctaaacccttggtgttcattctaaatatagaagtgttgcatgtataggatttcataaaggctaattgcataagaaagagtaaacaccacaggcttgaggtttttggctgttttttactaacaaggcagaatgtatgtactacctgaattctacctgcatttcaattaactatacaatgtctgtttattaaattactttgatttaaaaattaaaaaaaaaaaaaaaaa

SEQ ID NO: 595 - DNA, 7462 bp, Homo sapiens
gcacaagcccagcccgggcaagcggccgccacctgcccggcgccgcctccgcccgcccccaccgcggcgcaacttggatggagttggggtcctgagcgccggccccccacagccgccagcgcagagctcgtgccgccaccttcgttctgggacccctctctccgctgctcttcgctcccgcgatgggaaaagttggcgccggcggcggctcccaagcccggctgagcgcgctcctcgccggcgcggggctcttgatcctctgcgccccgggcgtctgcggcggcggctcctgctgcccctcgccgcaccccagctccgctccacgctcggcctcgacccctaggggcttttcccaccaggggcggccaggcagggctcctgccacgcccctgcccctcgtagtgcgtcccctgttctcagtggcccccggggaccgagcgctatccctggagcgggctcggggcactggggcatccatggcggttgctgcacgctccggccggaggagacggagcggagcggatcaggagaaggcagaacggggagagggcgcgagtcggagcccccggggagtgctaagagatggagggcagcaggagcctgggactcgggagcgggacccggacaaagccacccgcttccggatggaggagctgagactgaccagcaccacgtttgcgctgacgggagactcagcacacaaccaagccatggtccactggtctggccacaacagcagcgtgattctcattttgacaaagctctatgactataacctggggagcatcacagagagctcgctttggaggtcaaccgattatggaacaacctatgagaagctgaatgataaagttggtttgaaaaccattttgagctatctctatgtgtgtcctaccaacaagcgtaagataatgttactcacagacccggagattgagagcagtttattgatcagctcagatgaaggggcaacttatcaaaagtaccggctgaacttctacattcaaagcttgctttttcaccccaaacaagaagactggattctggcatacagtcaagaccaaaagttatacagctctgctgaatttgggagaagatggcagcttatccaagaaggggttgtaccaaacaggttctactggtctgtgatggggtcaaataaagaaccagaccttgtgcatcttgaggccagaactgtggatggtcattcacattatctaacttgccgaatgcagaactgtacagaggccaacaggaatcagccttttccaggctacattgacccagactctttgattgttcaggatcattatgtgtttgttcagctgacatcaggagggcggccacattactacgtgtcctaccgaaggaatgcatttgcccaaatgaagcttccgaaatatgctttgcccaaggacatgcatgttatcagcaccgatgagaatcaggtgttcgcagcggtccaagaatggaaccagaatgacacgtacaacctctacatctcagacacacgtggtgtctacttcaccctggccttggagaatgtccagagcagcagaggccctgagggcaacatcatgatcgacctctatgaggtagcagggataaagggaatgttcttggctaacaagaagattgacaaccaagtgaagactttcatcacatataacaaaggcagagactggcgtttgctgcaggcgccggacacggatctaaggggggaccccgtgcactgcttgctgccctattgctcactacaccttcacctgaaggtctctgagaatccctacacatcagggatcattgccagcaaagacacagctccaagcatcatagtggcatcaggtaatataggttctgaattgtcagacactgacatcagcatgtttgtctcttcagatgcagggaacacctggagacagatctttgaagaagagcacagtgttttgtacctggatcaaggtggagtcctggttgctatgaaacacacatctctcccaattcgacatctttggttgagttttgatgaagggagatcttggagcaaatacagtttcacatctattccactttttgtggatggggttctgggtgagcctggagaagagactctcatcatgacagtgtttggacacttcagccaccgctctgaatggcagctggtcaaagtagattacaagtccatttttgatagacggtgtgccgaagaggactacagaccttggcagctgcacagccagggggaagcatgtatcatgggagcaaaaaggatatataagaagcgaaaatcagagcggaagtgtatgcaaggaaaatatgcaggagctatggaatctgaaccctgtgtctgcactgaggctgattttgattgcgactatggttatgagcgacacagcaatggccagtgcctgccggcattttggttcaatccatcctctctgtcaaaggattgcagcttgggacagagttacctcaatagtactgggtacaggaaggtggtttccaataattgcactgatggcgtaagggaacagtacactgccaaaccgcagaagtgcccagggaaagccccgcgggggctgcggatagtcacggctgatggaaagctgacagcggaacaaggacacaacgtcactctcatggtgcaattagaagagggtgatgttcagcggacactcatccaagtggactttggcgatggtatcgcggtgtcttacgtcaatctcagctccatggaagatgggatcaaacacgtctatcagaacgtgggcattttccgtgtgaccgtgcaggtggacaacagtctgggttctgacagcgccgtcctgtacttacatgtaacttgtcccttggagcacgtgcacctgtctcttccctttgtcaccacaaagaacaaagaggtcaatgcgacggcagtgctgtggcccagccaagtgggcaccctcacttacgtgtggtggtacggaaacaacacggagcctttgatcaccttggagggaagcatatccttcagatttacttcagaaggaatgaataccatcacagtgcaggtctcagctgggaatgccatcctacaagacacaaagaccatcgcagtatatgaggaattccggtctcttcgcttgtccttttctccaaacctggatgactacaacccggacatccctgagtggaggagggacatcggtcgagtcatcaaaaaatccctggtggaagccacaggggttccaggccagcacatcctggtggcggtgctccctggcttacccaccactgctgaactctttgtcctaccctatcaggatccagctggagaaaacaaaaggtcaactgatgacctggagcagatatcagaattgctgatccacacgctcaaccaaaactcagtacacttcgagctgaagccaggagtccgagtccttgtccatgctgctcacttaacagcggcccccctggtggacctcactccaacccacagtggatctgccatgctgatgctgctctcagtggtgtttgtggggctggcagtgttcgtcatctacaagtttaaaaggagagtagctttaccctcccctccctccccttctactcaacctggtgactcatctctccgattgcaaagagcaagacacgccactccgccttcaacgccaaagcggggatctgctggggcacagtatgcaatttaaggaaaacccccaaaggctacaggcgacctgctgatcaggaaagaatttcgctcttgtcaagtacatcatccttcatgaccactaactttgtgttttttttctttcctttgttgttctgtttcctattttgccaggaagtatttccatagttgctgagaatcaaagcacaaaagaaatccctacctatgtaaatgtttgaatggaggacgccagtaaaaaaacaaaaacaaaaacaaaacaaaacataaaatataaacaatcaaaatccaaacaaacaaacaaacactcactgcatcgggactttttaattcttcagacacagacaacaagggtttttagctttaagcctgtgcatgtggacaatactctgagaacatgtctggaggggcagtgtacaggtgctctattttaatggaaaacactcccctctccctctttcttcttctctctcttttttctgatcggtcgtgtttgtagaaaattcataacatatataggccaaggaaatctgcatgtatttttggaaatattcttggctctagatttatcagctattttagcattaaaggctgatgggtggattagctaccccagctcctttcataagacacaaagacgtgcacaggagtttgaaaccctgagctgtttctctgttccactttccatactgtcatttcccttctaagttagctttggtagctctgttggtcagcagtggccacaaggctgctttctgcactctctgtggccacaggaacaaagatgcgagttgaagatccctttgtgccggtagaataaggaaggaagggaggcagggaggcaaagcatgtcagaaacggaccttggtttcctgttcacctctttccaccatgattgcctccccttgcagctttccctactcctgccccaactgcagtaggaaatggaatcccattagttacccattgtcctgtcttcacatttgtttgtcatccatgtgtgaccatgatctgttgatatctttgaatctcttccctccaaaccccaagtaagttgtccttcaactgttctcagtttttcttcccaaacatattgctagattctggacattaaccctgacgtttcctaaatactggcctggcctgtgccgcccctgcccccactactcacaagtttctgagccctttgtcagttttgtacattcccaagcatgccagcttctgtgcccatggaccttgctgcatcctgcacagcagggttcagtttcatgtatctttgtcttttcctctagaacctgcctttttcaaatatccctgccttttcccacctggaaacatatactgtatgcgaaagagttgatatatgcaaagtaattcaaacctggccatgtactttggaaaagaaagcatagagatgaattgtggtgttctcacaccttaacgaaaatctcgtgcgatctgattccagaagattcttgtgagaaatgttttgaatgtgtgacaatttcgcagggcaatttcctcctgtgacggttgctgttacctggtatttccactctcacagtagaatagaaatgtttgtgaaataaaactgattttaactggaaggagaaacaggttaatggactttgtgtttaagagtgtcaaacagtctgagagaataaatgggggtcttgtcttacattagggtgagagtttgattatttaggatgatcccagtgatttcatgtgtgctctctgacctctgagtatcatagtatcattaaagtaaagatttaagtctgtataaaggaggagagttactgattggcaaaaaagattggcacaaagcatgaagaaaccccatttttcccagggtaatcatgaaagaaggctcagagaaagagggaaacaaaagcctgttcagcagaggcccctttagtattatggactgggcaaagcccactataaactataggagaaagaagttctgataaacctcttagtatgctcagcctccttctttgctatgtccctaagccaacagggtataacacaggccctggtgataatgagggtgtcctaaagatcctgatgtccatgacttcatgtagttcaggcacagaaagaatagcaaagctgctgtcagaagtttgtcaggcagagatgtttatggttgaggataccccatatgaatctgggaaatgggctaggcctgaggcagtcacctatttgtagaactcaattgatccccaacctgccaggcttcctatctcataggaaacatcctcattgatcctcttcagttggagtctcccaaatttaatgtggaagacaaagtgttggaaaatcaaaagaggctcactcaaaccagcacagggagtcctcagagttgcagttcaattcattttaattagaaaagtatgaaagaggtataacactcttattctagcacagtgccttgcctagagtagtagtatgaaaactatttgttgaagaaataaatgaatggaaagacatagggaagaatgggctgtaaatcctaattaaaaatagaggtcgacatgagatacctggcattttgggaagtgaccaaagatggccagctagagattcagcatctccaggatcctcatgtgcctctcctcaaagctccctcccatctgtaggagattagtgaggcaaggtgctgctcagagaggaggacctcattgttcttaggaccttggccagttgttctcaaagtgtggtacctggatcagcagtatcactatcacttgggctagttagagatccagattctggatccataccccatacctactgaattagaaactctaggggatgaatagtggtgttctctgttgctaagtgacagtgggcccagccacctattttaacaagccctcccagtgattgtgatacatactaaagtttgagaaccattgtactaggccattccagctgaatctcaaacagaaggcagtaatgagagcctacaaatgggagggacctaagtgcctacctactcgctaatcgcaggtgcaaacacacaaggagtttggtgggcttaaggtcagaggagtgtgtagggagggatgtatgtggaaggtaagattcagggcaagctaaaaatccgatactgcaacgttttccaaaatcccagaaggcaaactgtgcatgttctaccctgaaccacccaagcaacactttctaccttgccttatttttaattggattcactgtccaaaatgcagaggtttgctttgcttttttttcagaagttccaaacagcaactttgagagcagtggggtgcttggcagctgttctgtgttttccaggaatccaactgagcattgaaatctctcatttgccgacttatttttataggaagccaattaaaaaaaaaaaaagttttcttatagtattggaactacttctaattttaaaatgacttttttgatgtattttttgttaaatactatgtagtgtaatgtataattgctcttgtttattgcttttacaatcatatttattaaacagataatgtctctaaagtctttgcctcaggtatttttttttttaatcctaaacccttggtgttcattctaaatatagaagtgttgcatgtataggatttcataaaggctaattgcataagaaagagtaaacaccacaggcttgaggtttttggctgttttttactaacaaggcagaatgtatgtactacctgaattctacctgcatttcaattaactatacaatgtctgtttattaaattactttgatttaaaaattaaaaaaaaaaaaaaaaa

SEQ ID NO: 596 - DNA, 4142 bp, Homo sapiens
gcacaagcccagcccgggcaagcggccgccacctgcccggcgccgcctccgcccgcccccaccgcggcgcaacttggatggagttggggtcctgagcgccggccccccacagccgccagcgcagagctcgtgccgccaccttcgttctgggacccctctctccgctgctcttcgctcccgcgatgggaaaagttggcgccggcggcggctcccaagcccggctgagcgcgctcctcgccggcgcggggctcttgatcctctgcgccccgggcgtctgcggcggcggctcctgctgcccctcgccgcaccccagctccgctccacgctcggcctcgacccctaggggcttttcccaccaggggcggccaggcagggctcctgccacgcccctgcccctcgtagtgcgtcccctgttctcagtggcccccggggaccgagcgctatccctggagcgggctcggggcactggggcatccatggcggttgctgcacgctccggccggaggagacggagcggagcggatcaggagaaggcagaacggggagagggcgcgagtcggagcccccggggagtgctaagagatggagggcagcaggagcctgggactcgggagcgggacccggacaaagccacccgcttccggatggaggagctgagactgaccagcaccacgtttgcgctgacgggagactcagcacacaaccaagccatggtccactggtctggccacaacagcagcgtgattctcattttgacaaagctctatgactataacctggggagcatcacagagagctcgctttggaggtcaaccgattatggaacaacctatgagaagctgaatgataaagttggtttgaaaaccattttgagctatctctatgtgtgtcctaccaacaagcgtaagataatgttactcacagacccggagattgagagcagtttattgatcagctcagatgaaggggcaacttatcaaaagtaccggctgaacttctacattcaaagcttgctttttcaccccaaacaagaagactggattctggcatacagtcaagaccaaaagttatacagctctgctgaatttgggagaagatggcagcttatccaagaaggggttgtaccaaacaggttctactggtctgtgatggggtcaaataaagaaccagaccttgtgcatcttgaggccagaactgtggatggtcattcacattatctaacttgccgaatgcagaactgtacagaggccaacaggaatcagccttttccaggctacattgacccagactctttgattgttcaggatcattatgtgtttgttcagctgacatcaggagggcggccacattactacgtgtcctaccgaaggaatgcatttgcccaaatgaagcttccgaaatatgctttgcccaaggacatgcatgttatcagcaccgatgagaatcaggtgttcgcagcggtccaagaatggaaccagaatgacacgtacaacctctacatctcagacacacgtggtgtctacttcaccctggccttggagaatgtccagagcagcagaggccctgagggcaacatcatgatcgacctctatgaggtagcagggataaagggaatgttcttggctaacaagaagattgacaaccaagtgaagactttcatcacatataacaaaggcagagactggcgtttgctgcaggcgccggacacggatctaaggggggaccccgtgcactgcttgctgccctattgctcactacaccttcacctgaaggtctctgagaatccctacacatcagggatcattgccagcaaagacacagctccaagcatcatagtggcatcaggtaatataggttctgaattgtcagacactgacatcagcatgtttgtctcttcagatgcagggaacacctggagacagatctttgaagaagagcacagtgttttgtacctggatcaaggtggagtcctggttgctatgaaacacacatctctcccaattcgacatctttggttgagttttgatgaagggagatcttggagcaaatacagtttcacatctattccactttttgtggatggggttctgggtgagcctggagaagagactctcatcatgacagtgtttggacacttcagccaccgctctgaatggcagctggtcaaagtagattacaagtccatttttgatagacggtgtgccgaagaggactacagaccttggcagctgcacagccagggggaagcatgtatcatgggagcaaaaaggatatataagaagcgaaaatcagagcggaagtgtatgcaaggaaaatatgcaggagctatggaatctgaaccctgtgtctgcactgaggctgattttgattgcgactatggttatgagcgacacagcaatggccagtgcctgccggcattttggttcaatccatcctctctgtcaaaggattgcagcttgggacagagttacctcaatagtactgggtacaggaaggtggtttccaataattgcactgatggcgtaagggaacagtacactgccaaaccgcagaagtgcccagggaaagccccgcgggggctgcggatagtcacggctgatggaaagctgacagcggaacaaggacacaacgtcactctcatggtgcaattagaagagggtgatgttcagcggacactcatccaagtggactttggcgatggtatcgcggtgtcttacgtcaatctcagctccatggaagatgggatcaaacacgtctatcagaacgtgggcattttccgtgtgaccgtgcaggtggacaacagtctgggttctgacagcgccgtcctgtacttacatgtaacttgtcccttggagcacgtgcacctgtctcttccctttgtcaccacaaagaacaaagaggtcaatgcgacggcagtgctgtggcccagccaagtgggcaccctcacttacgtgtggtggtacggaaacaacacggagcctttgatcaccttggagggaagcatatccttcagatttacttcagaaggaatgaataccatcacagtgcaggtctcagctgggaatgccatcctacaagacacaaagaccatcgcagtatatgaggaattccggtctcttcgcttgtccttttctccaaacctggatgactacaacccggacatccctgagtggaggagggacatcggtcgagtcatcaaaaaatccctggtggaagccacaggggttccaggccagcacatcctggtggcggtgctccctggcttacccaccactgctgaactctttgtcctaccctatcaggatccagctggagaaaacaaaaggtcaactgatgacctggagcagatatcagaattgctgatccacacgctcaaccaaaactcagtacacttcgagctgaagccaggagtccgagtccttgtccatgctgctcacttaacagcggcccccctggtggacctcactccaacccacagtggatctgccatgctgatgctgctctcagtggtgtttgtggggctggcagtgttcgtcatctacaagtttaaaaggaagatcccggggattaatgtttatgcccagatgcagaatgagaaagaacaagagatgatcagtccagtcagtcactctgaaagcaggcccaatgtccctcagactgaactaaggaggcctggccagcttatagatgagaaggtggaatcccagctcataggtaaatgattcccagtagccaccagctgttcggctgagtaggcaatggctgactctctctctaacccctttctggcttgacataaccactttcttttgctctaacacccctgagagaaacagctaagatggctttttccctgcttcctctgattgggatgggggaaaaacaaacaaacctcttgcttctatctagtttttttctctcattagtttattcctccttttgcaaaaccctccctaaaatattgggcttaaaatgttaaaatgttatatgtttatgggcaaagagcaaagcatttgctttaatagtatataagaaggagaggcctcagaggctaaggctggtggaccagagggctgggcagggtttgcaggacatggtatgtattgactagaatgaaacatggtagcctcaactggatacag

SEQ ID NO: 597 - DNA, 4090 bp, Homo sapiens
gttctgggacccctctctccgctgctcttcgctcccgcgatgggaaaagttggcgccggcggcggctcccaagcccggctgagcgcgctcctcgccggcgcggggctcttgatcctctgcgccccgggcgtctgcggcggcggctcctgctgcccctcgccgcaccccagctccgctccacgctcggcctcgacccctaggggcttttcccaccaggggcggccaggcagggctcctgccacgcccctgcccctcgtagtgcgtcccctgttctcagtggcccccggggaccgagcgctatccctggagcgggctcggggcactggggcatccatggcggttgctgcacgctccggccggaggagacggagcggagcggatcaggagaaggcagaacggggagagggcgcgagtcggagcccccggggagtgctaagagatggagggcagcaggagcctgggactcgggagcgggacccggacaaagccacccgcttccggatggaggagctgagactgaccagcaccacgtttgcgctgacgggagactcagcacacaaccaagccatggtccactggtctggccacaacagcagcgtgattctcattttgacaaagctctatgactataacctggggagcatcacagagagctcgctttggaggtcaaccgattatggaacaacctatgagaagctgaatgataaagttggtttgaaaaccattttgagctatctctatgtgtgtcctaccaacaagcgtaagataatgttactcacagacccggagattgagagcagtttattgatcagctcagatgaaggggcaacttatcaaaagtaccggctgaacttctacattcaaagcttgctttttcaccccaaacaagaagactggattctggcatacagtcaagaccaaaagttatacagctctgctgaatttgggagaagatggcagcttatccaagaaggggttgtaccaaacaggttctactggtctgtgatggggtcaaataaagaaccagaccttgtgcatcttgaggccagaactgtggatggtcattcacattatctaacttgccgaatgcagaactgtacagaggccaacaggaatcagccttttccaggctacattgacccagactctttgattgttcaggatcattatgtgtttgttcagctgacatcaggagggcggccacattactacgtgtcctaccgaaggaatgcatttgcccaaatgaagcttccgaaatatgctttgcccaaggacatgcatgttatcagcaccgatgagaatcaggtgttcgcagcggtccaagaatggaaccagaatgacacgtacaacctctacatctcagacacacgtggtgtctacttcaccctggccttggagaatgtccagagcagcagaggccctgagggcaacatcatgatcgacctctatgaggtagcagggataaagggaatgttcttggctaacaagaagattgacaaccaagtgaagactttcatcacatataacaaaggcagagactggcgtttgctgcaggcgccggacacggatctaaggggggaccccgtgcactgcttgctgccctattgctcactacaccttcacctgaaggtctctgagaatccctacacatcagggatcattgccagcaaagacacagctccaagcatcatagtggcatcaggtaatataggttctgaattgtcagacactgacatcagcatgtttgtctcttcagatgcagggaacacctggagacagatctttgaagaagagcacagtgttttgtacctggatcaaggtggagtcctggttgctatgaaacacacatctctcccaattcgacatctttggttgagttttgatgaagggagatcttggagcaaatacagtttcacatctattccactttttgtggatggggttctgggtgagcctggagaagagactctcatcatgacagtgtttggacacttcagccaccgctctgaatggcagctggtcaaagtagattacaagtccatttttgatagacggtgtgccgaagaggactacagaccttggcagctgcacagccagggggaagcatgtatcatgggagcaaaaaggatatataagaagcgaaaatcagagcggaagtgtatgcaaggaaaatatgcaggagctatggaatctgaaccctgtgtctgcactgaggctgattttgattgcgactatggttatgagcgacacagcaatggccagtgcctgccggcattttggttcaatccatcctctctgtcaaaggattgcagcttgggacagagttacctcaatagtactgggtacaggaaggtggtttccaataattgcactgatggcgtaagggaacagtacactgccaaaccgcagaagtgcccagggaaagccccgcgggggctgcggatagtcacggctgatggaaagctgacagcggaacaaggacacaacgtcactctcatggtgcaattagaagagggtgatgttcagcggacactcatccaagtggactttggcgatggtatcgcggtgtcttacgtcaatctcagctccatggaagatgggatcaaacacgtctatcagaacgtgggcattttccgtgtgaccgtgcaggtggacaacagtctgggttctgacagcgccgtcctgtacttacatgtaacttgtcccttggagcacgtgcacctgtctcttccctttgtcaccacaaagaacaaagaggtcaatgcgacggcagtgctgtggcccagccaagtgggcaccctcacttacgtgtggtggtacggaaacaacacggagcctttgatcaccttggagggaagcatatccttcagatttacttcagaaggaatgaataccatcacagtgcaggtctcagctgggaatgccatcctacaagacacaaagaccatcgcagtatatgaggaattccggtctcttcgcttgtccttttctccaaacctggatgactacaacccggacatccctgagtggaggagggacatcggtcgagtcatcaaaaaatccctggtggaagccacaggggttccaggccagcacatcctggtggcggtgctccctggcttacccaccactgctgaactctttgtcctaccctatcaggatccagctggagaaaacaaaaggtcaactgatgacctggagcagatatcagaattgctgatccacacgctcaaccaaaactcagtacacttcgagctgaagccaggagtccgagtccttgtccatgctgctcacttaacagcggcccccctggtggacctcactccaacccacagtggatctgccatgctgatgctgctctcagtggtgtttgtggggctggcagtgttcgtcatctacaagtttaaaaggaagatcccggggattaatgtttatgcccagatgcagaatgagaaagaacaagagatgatcagtccagtcagtcactctgaaagcaggcccaatgtccctcagactgaactaaggaggcctggccagcttatagatgagaaggtggaatcccagctcatagaagttccaaacagcaactttgagagcagtggggtgcttggcagctgttctgtgttttccaggaatccaactgagcattgaaatctctcatttgccgacttatttttataggaagccaattaaaaaaaaaaaaagttttcttatagtattggaactacttctaattttaaaatgacttttttgatgtattttttgttaaatactatgtagtgtaatgtataattgctcttgtttattgcttttacaatcatatttattaaacagataatgtctctaaagtctttgcctcaggtatttttttttttaatcctaaacccttggtgttcattctaaatatagaagtgttgcatgtataggatttcataaaggctaattgcataagaaagagtaaacaccacaggcttgaggtttttggctgttttttactaacaaggcagaatgtatgtactacctgaattctacctgcatttcaattaactatacaatgtctgtttattaaattactttgatttaaaaatta

SEQ ID NO: 598 - DNA, 3633 bp, Homo sapiens
gttctgggacccctctctccgctgctcttcgctcccgcgatgggaaaagttggcgccggcggcggctcccaagcccggctgagcgcgctcctcgccggcgcggggctcttgatcctctgcgccccgggcgtctgcggcggcggctcctgctgcccctcgccgcaccccagctccgctccacgctcggcctcgacccctaggggcttttcccaccaggggcggccaggcagggctcctgccacgcccctgcccctcgtagtgcgtcccctgttctcagtggcccccggggaccgagcgctatccctggagcgggctcggggcactggggcatccatggcggttgctgcacgctccggccggaggagacggagcggagcggatcaggagaaggcagaacggggagagggcgcgagtcggagcccccggggagtgctaagagatggagggcagcaggagcctgggactcgggagcgggacccggacaaagccacccgcttccggatggaggagctgagactgaccagcaccacgtttgcgctgacgggagactcagcacacaaccaagccatggtccactggtctggccacaacagcagcgtgattctcattttgacaaagctctatgactataacctggggagcatcacagagagctcgctttggaggtcaaccgattatggaacaacctatgagaagctgaatgataaagttggtttgaaaaccattttgagctatctctatgtgtgtcctaccaacaagcgtaagataatgttactcacagacccggagattgagagcagtttattgatcagctcagatgaaggggcaacttatcaaaagtaccggctgaacttctacattcaaagcttgctttttcaccccaaacaagaagactggattctggcatacagtcaagaccaaaagttatacagctctgctgaatttgggagaagatggcagcttatccaagaaggggttgtaccaaacaggttctactggtctgtgatggggtcaaataaagaaccagaccttgtgcatcttgaggccagaactgtggatggtcattcacattatctaacttgccgaatgcagaactgtacagaggccaacaggaatcagccttttccaggctacattgacccagactctttgattgttcaggatcattatgtgtttgttcagctgacatcaggagggcggccacattactacgtgtcctaccgaaggaatgcatttgcccaaatgaagcttccgaaatatgctttgcccaaggacatgcatgttatcagcaccgatgagaatcaggtgttcgcagcggtccaagaatggaaccagaatgacacgtacaacctctacatctcagacacacgtggtgtctacttcaccctggccttggagaatgtccagagcagcagaggccctgagggcaacatcatgatcgacctctatgaggtagcagggataaagggaatgttcttggctaacaagaagattgacaaccaagtgaagactttcatcacatataacaaaggcagagactggcgtttgctgcaggcgccggacacggatctaaggggggaccccgtgcactgcttgctgccctattgctcactacaccttcacctgaaggtctctgagaatccctacacatcagggatcattgccagcaaagacacagctccaagcatcatagtggcatcaggtaatataggttctgaattgtcagacactgacatcagcatgtttgtctcttcagatgcagggaacacctggagacagatctttgaagaagagcacagtgttttgtacctggatcaaggtggagtcctggttgctatgaaacacacatctctcccaattcgacatctttggttgagttttgatgaagggagatcttggagcaaatacagtttcacatctattccactttttgtggatggggttctgggtgagcctggagaagagactctcatcatgacagtgtttggacacttcagccaccgctctgaatggcagctggtcaaagtagattacaagtccatttttgatagacggtgtgccgaagaggactacagaccttggcagctgcacagccagggggaagcatgtatcatgggagcaaaaaggatatataagaagcgaaaatcagagcggaagtgtatgcaaggaaaatatgcaggagctatggaatctgaaccctgtgtctgcactgaggctgattttgattgcgactatggttatgagcgacacagcaatggccagtgcctgccggcattttggttcaatccatcctctctgtcaaaggattgcagcttgggacagagttacctcaatagtactgggtacaggaaggtggtttccaataattgcactgatggcgtaagggaacagtacactgccaaaccgcagaagtgcccagggaaagccccgcgggggctgcggatagtcacggctgatggaaagctgacagcggaacaaggacacaacgtcactctcatggtgcaattagaagagggtgatgttcagcggacactcatccaagtggactttggcgatggtatcgcggtgtcttacgtcaatctcagctccatggaagatgggatcaaacacgtctatcagaacgtgggcattttccgtgtgaccgtgcaggtggacaacagtctgggttctgacagcgccgtcctgtacttacatgtaacttgtcccttggagcacgtgcacctgtctcttccctttgtcaccacaaagaacaaagaggtcaatgcgacggcagtgctgtggcccagccaagtgggcaccctcacttacgtgtggtggtacggaaacaacacggagcctttgatcaccttggagggaagcatatccttcagatttacttcagaaggaatgaataccatcacagtgcaggtctcagctgggaatgccatcctacaagacacaaagaccatcgcagtatatgaggaattccggtctcttcgcttgtccttttctccaaacctggatgactacaacccggacatccctgagtggaggagggacatcggtcgagtcatcaaaaaatccctggtggaagccacaggggttccaggccagcacatcctggtggcggtgctccctggcttacccaccactgctgaactctttgtcctaccctatcaggatccagctggagaaaacaaaaggtcaactgatgacctggagcagatatcagaattgctgatccacacgctcaaccaaaactcagtacacttcgagctgaagccaggagtccgagtccttgtccatgctgctcacttaacagcggcccccctggtggacctcactccaacccacagtggatctgccatgctgatgctgctctcagtggtgtttgtggggctggcagtgttcgtcatctacaagtttaaaaggaagatcccggggattaatgtttatgcccagatgcagaatgagaaagaacaagagatgatcagtccagtcagtcactctgaaagcaggcccaatgtccctcagactgaactaaggaggcctggccagcttatagatgagaaggtggaatcccagctcataggaagatatcgcagcacattgcaaagtctctgacacctttccctttccagtgtcattaaatga

SEQ ID NO: 599 - DNA, 3958 bp, Homo sapiens
gttctgggacccctctctccgctgctcttcgctcccgcgatgggaaaagttggcgccggcggcggctcccaagcccggctgagcgcgctcctcgccggcgcggggctcttgatcctctgcgccccgggcgtctgcggcggcggctcctgctgcccctcgccgcaccccagctccgctccacgctcggcctcgacccctaggggcttttcccaccaggggcggccaggcagggctcctgccacgcccctgcccctcgtagtgcgtcccctgttctcagtggcccccggggaccgagcgctatccctggagcgggctcggggcactggggcatccatggcggttgctgcacgctccggccggaggagacggagcggagcggatcaggagaaggcagaacggggagagggcgcgagtcggagcccccggggagtgctaagagatggagggcagcaggagcctgggactcgggagcgggacccggacaaagccacccgcttccggatggaggagctgagactgaccagcaccacgtttgcgctgacgggagactcagcacacaaccaagccatggtccactggtctggccacaacagcagcgtgattctcattttgacaaagctctatgactataacctggggagcatcacagagagctcgctttggaggtcaaccgattatggaacaacctatgagaagctgaatgataaagttggtttgaaaaccattttgagctatctctatgtgtgtcctaccaacaagcgtaagataatgttactcacagacccggagattgagagcagtttattgatcagctcagatgaaggggcaacttatcaaaagtaccggctgaacttctacattcaaagcttgctttttcaccccaaacaagaagactggattctggcatacagtcaagaccaaaagttatacagctctgctgaatttgggagaagatggcagcttatccaagaaggggttgtaccaaacaggttctactggtctgtgatggggtcaaataaagaaccagaccttgtgcatcttgaggccagaactgtggatggtcattcacattatctaacttgccgaatgcagaactgtacagaggccaacaggaatcagccttttccaggctacattgacccagactctttgattgttcaggatcattatgtgtttgttcagctgacatcaggagggcggccacattactacgtgtcctaccgaaggaatgcatttgcccaaatgaagcttccgaaatatgctttgcccaaggacatgcatgttatcagcaccgatgagaatcaggtgttcgcagcggtccaagaatggaaccagaatgacacgtacaacctctacatctcagacacacgtggtgtctacttcaccctggccttggagaatgtccagagcagcagaggccctgagggcaacatcatgatcgacctctatgaggtagcagggataaagggaatgttcttggctaacaagaagattgacaaccaagtgaagactttcatcacatataacaaaggcagagactggcgtttgctgcaggcgccggacacggatctaaggggggaccccgtgcactgcttgctgccctattgctcactacaccttcacctgaaggtctctgagaatccctacacatcagggatcattgccagcaaagacacagctccaagcatcatagtggcatcaggtaatataggttctgaattgtcagacactgacatcagcatgtttgtctcttcagatgcagggaacacctggagacagatctttgaagaagagcacagtgttttgtacctggatcaaggtggagtcctggttgctatgaaacacacatctctcccaattcgacatctttggttgagttttgatgaagggagatcttggagcaaatacagtttcacatctattccactttttgtggatggggttctgggtgagcctggagaagagactctcatcatgacagtgtttggacacttcagccaccgctctgaatggcagctggtcaaagtagattacaagtccatttttgatagacggtgtgccgaagaggactacagaccttggcagctgcacagccagggggaagcatgtatcatgggagcaaaaaggatatataagaagcgaaaatcagagcggaagtgtatgcaaggaaaatatgcaggagctatggaatctgaaccctgtgtctgcactgaggctgattttgattgcgactatggttatgagcgacacagcaatggccagtgcctgccggcattttggttcaatccatcctctctgtcaaaggattgcagcttgggacagagttacctcaatagtactgggtacaggaaggtggtttccaataattgcactgatggcgtaagggaacagtacactgccaaaccgcagaagtgcccagggaaagccccgcgggggctgcggatagtcacggctgatggaaagctgacagcggaacaaggacacaacgtcactctcatggtgcaattagaagagggtgatgttcagcggacactcatccaagtggactttggcgatggtatcgcggtgtcttacgtcaatctcagctccatggaagatgggatcaaacacgtctatcagaacgtgggcattttccgtgtgaccgtgcaggtggacaacagtctgggttctgacagcgccgtcctgtacttacatgtaacttgtcccttggagcacgtgcacctgtctcttccctttgtcaccacaaagaacaaagaggtcaatgcgacggcagtgctgtggcccagccaagtgggcaccctcacttacgtgtggtggtacggaaacaacacggagcctttgatcaccttggagggaagcatatccttcagatttacttcagaaggaatgaataccatcacagtgcaggtctcagctgggaatgccatcctacaagacacaaagaccatcgcagtatatgaggaattccggtctcttcgcttgtccttttctccaaacctggatgactacaacccggacatccctgagtggaggagggacatcggtcgagtcatcaaaaaatccctggtggaaatatcagaattgctgatccacacgctcaaccaaaactcagtacacttcgagctgaagccaggagtccgagtccttgtccatgctgctcacttaacagcggcccccctggtggacctcactccaacccacagtggatctgccatgctgatgctgctctcagtggtgtttgtggggctggcagtgttcgtcatctacaagtttaaaaggaagatcccggggattaatgtttatgcccagatgcagaatgagaaagaacaagagatgatcagtccagtcagtcactctgaaagcaggcccaatgtccctcagactgaactaaggaggcctggccagcttatagatgagaaggtggaatcccagctcatagaagttccaaacagcaactttgagagcagtggggtgcttggcagctgttctgtgttttccaggaatccaactgagcattgaaatctctcatttgccgacttatttttataggaagccaattaaaaaaaaaaaaagttttcttatagtattggaactacttctaattttaaaatgacttttttgatgtattttttgttaaatactatgtagtgtaatgtataattgctcttgtttattgcttttacaatcatatttattaaacagataatgtctctaaagtctttgcctcaggtatttttttttttaatcctaaacccttggtgttcattctaaatatagaagtgttgcatgtataggatttcataaaggctaattgcataagaaagagtaaacaccacaggcttgaggtttttggctgttttttactaacaaggcagaatgtatgtactacctgaattctacctgcatttcaattaactatacaatgtctgtttattaaattactttgatttaaaaatta

SEQ ID NO: 600 - DNA, 4577 bp, Homo sapiens
gttctgggacccctctctccgctgctcttcgctcccgcgatgggaaaagttggcgccggcggcggctcccaagcccggctgagcgcgctcctcgccggcgcggggctcttgatcctctgcgccccgggcgtctgcggcggcggctcctgctgcccctcgccgcaccccagctccgctccacgctcggcctcgacccctaggggcttttcccaccaggggcggccaggcagggctcctgccacgcccctgcccctcgtagtgcgtcccctgttctcagtggcccccggggaccgagcgctatccctggagcgggctcggggcactggggcatccatggcggttgctgcacgctccggccggaggagacggagcggagcggatcaggagaaggcagaacggggagagggcgcgagtcggagcccccggggagtgctaagagatggagggcagcaggagcctgggactcgggagcgggacccggacaaagccacccgcttccggatggaggagctgagactgaccagcaccacgtttgcgctgacgggagactcagcacacaaccaagccatggtccactggtctggccacaacagcagcgtgattctcattttgacaaagctctatgactataacctggggagcatcacagagagctcgctttggaggtcaaccgattatggaacaacctatgagaagctgaatgataaagttggtttgaaaaccattttgagctatctctatgtgtgtcctaccaacaagcgtaagataatgttactcacagacccggagattgagagcagtttattgatcagctcagatgaaggggcaacttatcaaaagtaccggctgaacttctacattcaaagcttgctttttcaccccaaacaagaagactggattctggcatacagtcaagaccaaaagttatacagctctgctgaatttgggagaagatggcagcttatccaagaaggggttgtaccaaacaggttctactggtctgtgatggggtcaaataaagaaccagaccttgtgcatcttgaggccagaactgtggatggtcattcacattatctaacttgccgaatgcagaactgtacagaggccaacaggaatcagccttttccaggctacattgacccagactctttgattgttcaggatcattatgtgtttgttcagctgacatcaggagggcggccacattactacgtgtcctaccgaaggaatgcatttgcccaaatgaagcttccgaaatatgctttgcccaaggacatgcatgttatcagcaccgatgagaatcaggtgttcgcagcggtccaagaatggaaccagaatgacacgtacaacctctacatctcagacacacgtggtgtctacttcaccctggccttggagaatgtccagagcagcagaggccctgagggcaacatcatgatcgacctctatgaggtagcagggataaagggaatgttcttggctaacaagaagattgacaaccaagtgaagactttcatcacatataacaaaggcagagactggcgtttgctgcaggcgccggacacggatctaaggggggaccccgtgcactgcttgctgccctattgctcactacaccttcacctgaaggtctctgagaatccctacacatcagggatcattgccagcaaagacacagctccaagcatcatagtggcatcaggtaatataggttctgaattgtcagacactgacatcagcatgtttgtctcttcagatgcagggaacacctggagacagatctttgaagaagagcacagtgttttgtacctggatcaaggtggagtcctggttgctatgaaacacacatctctcccaattcgacatctttggttgagttttgatgaagggagatcttggagcaaatacagtttcacatctattccactttttgtggatggggttctgggtgagcctggagaagagactctcatcatgacagtgtttggacacttcagccaccgctctgaatggcagctggtcaaagtagattacaagtccatttttgatagacggtgtgccgaagaggactacagaccttggcagctgcacagccagggggaagcatgtatcatgggagcaaaaaggatatataagaagcgaaaatcagagcggaagtgtatgcaaggaaaatatgcaggagctatggaatctgaaccctgtgtctgcactgaggctgattttgattgcgactatggttatgagcgacacagcaatggccagtgcctgccggcattttggttcaatccatcctctctgtcaaaggattgcagcttgggacagagttacctcaatagtactgggtacaggaaggtggtttccaataattgcactgatggcgtaagggaacagtacactgccaaaccgcagaagtgcccagggaaagccccgcgggggctgcggatagtcacggctgatggaaagctgacagcggaacaaggacacaacgtcactctcatggtgcaattagaagagggtgatgttcagcggacactcatccaagtggactttggcgatggtatcgcggtgtcttacgtcaatctcagctccatggaagatgggatcaaacacgtctatcagaacgtgggcattttccgtgtgaccgtgcaggtggacaacagtctgggttctgacagcgccgtcctgtacttacatgtaacttgtcccttggagcacgtgcacctgtctcttccctttgtcaccacaaagaacaaagaggtcaatgcgacggcagtgctgtggcccagccaagtgggcaccctcacttacgtgtggtggtacggaaacaacacggagcctttgatcaccttggagggaagcatatccttcagatttacttcagaaggaatgaataccatcacagtgcaggtctcagctgggaatgccatcctacaagacacaaagaccatcgcagtatatgaggaattccggtctcttcgcttgtccttttctccaaacctggatgactacaacccggacatccctgagtggaggagggacatcggtcgagtcatcaaaaaatccctggtggaagccacaggggttccaggccagcacatcctggtggcggtgctccctggcttacccaccactgctgaactctttgtcctaccctatcaggatccagctggagaaaacaaaaggtcaactgatgacctggagcagatatcagaattgctgatccacacgctcaaccaaaactcagtacacttcgagctgaagccaggagtccgagtccttgtccatgctgctcacttaacagcgggtgtaataaaaagatgttatcacagagatattagagaattaatatttccaggcttcagttgctaccactggatgtgttatgagtaaatttgggagggaataagaaacttcaaatttcgacctaggtcgtgatacatcatgaattctgcactacaatttcacattgagaaaaagactttccacttgaagggagaattaccgttcgtcaagaagttttagaaactacaatataatctcagccacaacattatggatgcagatgccaaataggagttgtggaactctgaactgtaaagtgaagtaaattgttgcaataacattttccatttagggatgaaattagtactggtgaaattcttccacagccagtaagtttatctgtctctttagttttcggtcaccgtattatctacatagtaatcatttacaagtcttttttaagtaaagccttggtaccgatatgttttcttccttttatttttccccaaaataaatatattttttatcttcaagtaattaggtagttgcacagatacatagacccagcggcttttcatagttatttaatcattatggtgttataaacaatagtgggtttatcatgtagatatatatctaaatatatccctccccgcaatatgattaaatgtgatattttcatctacctaccagcgtgcagcaatgaggttgctcgttggcttcgtttagacacagaatctagttctgttttccagtctggagggcaggggcacatcatagctcactacagccttgaacacctgggctcaagcgatctgtctgcctcagcctctcgagtagctaggactacaggcacgcaccaccacatccaattaatatttttattttctgtagagacagggtgttgctatgttgcccaggctgatctcaaactcttggcctcaggagattcacccacttcagcctctcaaagcattgagattgcaggcatgagccaccatgcctggcctagcttctaataaattctttcttcaccatttctttttttctgagattacgggggaccgtaaaaggggctgaaatgattacagggtaactagactgagttagccaggctagaggatatgtctggaaactcttggtcagagaatggtcagcaaggaacagtcagatgaacagaaacaggggcacaaacatgcgtcagaaatgcagtatcccaggggaaggcaaggcagatagtcaagagaaattagcaaaaagaaaaaaaaaaagtaaagcaaaggggaaggataaca

SEQ ID NO: 601 - DNA, 3769 bp, Homo sapiens
atttctgtaagactgtcagtcccctaatggaatctcagtaacaactcccaccttgaatgatgcatgtcagcaattagtaggacaaaaggcatctggcacttttacatctgtgtttaaaaataacccttgttatttcctctaggttttaaaatcagacttgttccattatgaagagacaatcatggaacctaccggttgcctcttggtggacacatacgacattctctgtgtggaatgcagcctggattttctaggcacaattatcttagtttgcaggtgattctcattttgacaaagctctatgactataacctggggagcatcacagagagctcgctttggaggtcaaccgattatggaacaacctatgagaagctgaatgataaagttggtttgaaaaccattttgagctatctctatgtgtgtcctaccaacaagcgtaagataatgttactcacagacccggagattgagagcagtttattgatcagctcagatgaaggggcaacttatcaaaagtaccggctgaacttctacattcaaagcttgctttttcaccccaaacaagaagactggattctggcatacagtcaagaccaaaagttatacagctctgctgaatttgggagaagatggcagcttatccaagaaggggttgtaccaaacaggttctactggtctgtgatggggtcaaataaagaaccagaccttgtgcatcttgaggccagaactgtggatggtcattcacattatctaacttgccgaatgcagaactgtacagaggccaacaggaatcagccttttccaggctacattgacccagactctttgattgttcaggatcattatgtgtttgttcagctgacatcaggagggcggccacattactacgtgtcctaccgaaggaatgcatttgcccaaatgaagcttccgaaatatgctttgcccaaggacatgcatgttatcagcaccgatgagaatcaggtgttcgcagcggtccaagaatggaaccagaatgacacgtacaacctctacatctcagacacacgtggtgtctacttcaccctggccttggagaatgtccagagcagcagaggccctgagggcaacatcatgatcgacctctatgaggtagcagggataaagggaatgttcttggctaacaagaagattgacaaccaagtgaagactttcatcacatataacaaaggcagagactggcgtttgctgcaggcgccggacacggatctaaggggggaccccgtgcactgcttgctgccctattgctcactacaccttcacctgaaggtctctgagaatccctacacatcagggatcattgccagcaaagacacagctccaagcatcatagtggcatcaggtaatataggttctgaattgtcagacactgacatcagcatgtttgtctcttcagatgcagggaacacctggagacagatctttgaagaagagcacagtgttttgtacctggatcaaggtggagtcctggttgctatgaaacacacatctctcccaattcgacatctttggttgagttttgatgaagggagatcttggagcaaatacagtttcacatctattccactttttgtggatggggttctgggtgagcctggagaagagactctcatcatgacagtgtttggacacttcagccaccgctctgaatggcagctggtcaaagtagattacaagtccatttttgatagacggtgtgccgaagaggactacagaccttggcagctgcacagccagggggaagcatgtatcatgggagcaaaaaggatatataagaagcgaaaatcagagcggaagtgtatgcaaggaaaatatgcaggagctatggaatctgaaccctgtgtctgcactgaggctgattttgattgcgactatggttatgagcgacacagcaatggccagtgcctgccggcattttggttcaatccatcctctctgtcaaaggattgcagcttgggacagagttacctcaatagtactgggtacaggaaggtggtttccaataattgcactgatggcgtaagggaacagtacactgccaaaccgcagaagtgcccagggaaagccccgcgggggctgcggatagtcacggctgatggaaagctgacagcggaacaaggacacaacgtcactctcatggtgcaattagaagagggtgatgttcagcggacactcatccaagtggactttggcgatggtatcgcggtgtcttacgtcaatctcagctccatggaagatgggatcaaacacgtctatcagaacgtgggcattttccgtgtgaccgtgcaggtggacaacagtctgggttctgacagcgccgtcctgtacttacatgtaacttgtcccttggagcacgtgcacctgtctcttccctttgtcaccacaaagaacaaagaggtcaatgcgacggcagtgctgtggcccagccaagtgggcaccctcacttacgtgtggtggtacggaaacaacacggagcctttgatcaccttggagggaagcatatccttcagatttacttcagaaggaatgaataccatcacagtgcaggtctcagctgggaatgccatcctacaagacacaaagaccatcgcagtatatgaggaattccggtctcttcgcttgtccttttctccaaacctggatgactacaacccggacatccctgagtggaggagggacatcggtcgagtcatcaaaaaatccctggtggaagccacaggggttccaggccagcacatcctggtggcggtgctccctggcttacccaccactgctgaactctttgtcctaccctatcaggatccagctggagaaaacaaaaggtcaactgatgacctggagcagatatcagaattgctgatccacacgctcaaccaaaactcagtacacttcgagctgaagccaggagtccgagtccttgtccatgctgctcacttaacagcggcccccctggtggacctcactccaacccacagtggatctgccatgctgatgctgctctcagtggtgtttgtggggctggcagtgttcgtcatctacaagtttaaaaggaagatcccggggattaatgtttatgcccagatgcagaatgagaaagaacaagagatgatcagtccagtcagtcactctgaaagcaggcccaatgtccctcagactgaactaaggaggcctggccagcttatagatgagaaggtggaatcccagctcatagaagttccaaacagcaactttgagagcagtggggtgcttggcagctgttctgtgttttccaggaatccaactgagcattgaaatctctcatttgccgacttatttttataggaagccaattaaaaaaaaaaaaagttttcttatagtattggaactacttctaattttaaaatgacttttttgatgtattttttgttaaatactatgtagtgtaatgtataattgctcttgtttattgcttttacaatcatatttattaaacagataatgtctctaaagtctttgcctcaggtatttttttttttaatcctaaacccttggtgttcattctaaatatagaagtgttgcatgtataggatttcataaaggctaattgcataagaaagagtaaacaccacaggcttgaggtttttggctgttttttactaacaaggcagaatgtatgtactacctgaattctacctgcatttcaattaactatacaatgtctgtttattaaattactttgatttaaaaatta

SEQ ID NO: 602 - DNA, 3568 bp, Homo sapiens
taggacttcacattcactcatcacacactcactgattcacctaaacgagttccagtcctgcaagcttcattcatggtgattctcattttgacaaagctctatgactataacctggggagcatcacagagagctcgctttggaggtcaaccgattatggaacaacctatgagaagctgaatgataaagttggtttgaaaaccattttgagctatctctatgtgtgtcctaccaacaagcgtaagataatgttactcacagacccggagattgagagcagtttattgatcagctcagatgaaggggcaacttatcaaaagtaccggctgaacttctacattcaaagcttgctttttcaccccaaacaagaagactggattctggcatacagtcaagaccaaaagttatacagctctgctgaatttgggagaagatggcagcttatccaagaaggggttgtaccaaacaggttctactggtctgtgatggggtcaaataaagaaccagaccttgtgcatcttgaggccagaactgtggatggtcattcacattatctaacttgccgaatgcagaactgtacagaggccaacaggaatcagccttttccaggctacattgacccagactctttgattgttcaggatcattatgtgtttgttcagctgacatcaggagggcggccacattactacgtgtcctaccgaaggaatgcatttgcccaaatgaagcttccgaaatatgctttgcccaaggacatgcatgttatcagcaccgatgagaatcaggtgttcgcagcggtccaagaatggaaccagaatgacacgtacaacctctacatctcagacacacgtggtgtctacttcaccctggccttggagaatgtccagagcagcagaggccctgagggcaacatcatgatcgacctctatgaggtagcagggataaagggaatgttcttggctaacaagaagattgacaaccaagtgaagactttcatcacatataacaaaggcagagactggcgtttgctgcaggcgccggacacggatctaaggggggaccccgtgcactgcttgctgccctattgctcactacaccttcacctgaaggtctctgagaatccctacacatcagggatcattgccagcaaagacacagctccaagcatcatagtggcatcaggtaatataggttctgaattgtcagacactgacatcagcatgtttgtctcttcagatgcagggaacacctggagacagatctttgaagaagagcacagtgttttgtacctggatcaaggtggagtcctggttgctatgaaacacacatctctcccaattcgacatctttggttgagttttgatgaagggagatcttggagcaaatacagtttcacatctattccactttttgtggatggggttctgggtgagcctggagaagagactctcatcatgacagtgtttggacacttcagccaccgctctgaatggcagctggtcaaagtagattacaagtccatttttgatagacggtgtgccgaagaggactacagaccttggcagctgcacagccagggggaagcatgtatcatgggagcaaaaaggatatataagaagcgaaaatcagagcggaagtgtatgcaaggaaaatatgcaggagctatggaatctgaaccctgtgtctgcactgaggctgattttgattgcgactatggttatgagcgacacagcaatggccagtgcctgccggcattttggttcaatccatcctctctgtcaaaggattgcagcttgggacagagttacctcaatagtactgggtacaggaaggtggtttccaataattgcactgatggcgtaagggaacagtacactgccaaaccgcagaagtgcccagggaaagccccgcgggggctgcggatagtcacggctgatggaaagctgacagcggaacaaggacacaacgtcactctcatggtgcaattagaagagggtgatgttcagcggacactcatccaagtggactttggcgatggtatcgcggtgtcttacgtcaatctcagctccatggaagatgggatcaaacacgtctatcagaacgtgggcattttccgtgtgaccgtgcaggtggacaacagtctgggttctgacagcgccgtcctgtacttacatgtaacttgtcccttggagcacgtgcacctgtctcttccctttgtcaccacaaagaacaaagaggtcaatgcgacggcagtgctgtggcccagccaagtgggcaccctcacttacgtgtggtggtacggaaacaacacggagcctttgatcaccttggagggaagcatatccttcagatttacttcagaaggaatgaataccatcacagtgcaggtctcagctgggaatgccatcctacaagacacaaagaccatcgcagtatatgaggaattccggtctcttcgcttgtccttttctccaaacctggatgactacaacccggacatccctgagtggaggagggacatcggtcgagtcatcaaaaaatccctggtggaagccacaggggttccaggccagcacatcctggtggcggtgctccctggcttacccaccactgctgaactctttgtcctaccctatcaggatccagctggagaaaacaaaaggtcaactgatgacctggagcagatatcagaattgctgatccacacgctcaaccaaaactcagtacacttcgagctgaagccaggagtccgagtccttgtccatgctgctcacttaacagcggcccccctggtggacctcactccaacccacagtggatctgccatgctgatgctgctctcagtggtgtttgtggggctggcagtgttcgtcatctacaagtttaaaaggaagatcccggggattaatgtttatgcccagatgcagaatgagaaagaacaagagatgatcagtccagtcagtcactctgaaagcaggcccaatgtccctcagactgaactaaggaggcctggccagcttatagatgagaaggtggaatcccagctcatagaagttccaaacagcaactttgagagcagtggggtgcttggcagctgttctgtgttttccaggaatccaactgagcattgaaatctctcatttgccgacttatttttataggaagccaattaaaaaaaaaaaaagttttcttatagtattggaactacttctaattttaaaatgacttttttgatgtattttttgttaaatactatgtagtgtaatgtataattgctcttgtttattgcttttacaatcatatttattaaacagataatgtctctaaagtctttgcctcaggtatttttttttttaatcctaaacccttggtgttcattctaaatatagaagtgttgcatgtataggatttcataaaggctaattgcataagaaagagtaaacaccacaggcttgaggtttttggctgttttttactaacaaggcagaatgtatgtactacctgaattctacctgcatttcaattaactatacaatgtctgtttattaaattactttgatttaaaaatta

SEQ ID NO: 603 - DNA, 2724 bp, Homo sapiens
gacacacgtggtgtctacttcaccctggccttggagaatgtccagagcagcagaggccctgagggcaacatcatgatcgacctctatgagcagggataaagggaatgttcttggctaacaagaagattgacaaccaagtgaagactttcatcacatataacaaaggcagagactggcgtttgctgcaggcgccggacacggatctaaggggggaccccgtgcactgcttgctgccctattgctcactacaccttcacctgaaggtctctgagaatccctacacatcagggatcattgccagcaaagacacagctccaagcatcatagtggcatcaggtaatataggttctgaattgtcagacactgacatcagcatgtttgtctcttcagatgcagggaacacctggagacagatctttgaagaagagcacagtgttttgtacctggatcaaggtggagtcctggttgctatgaaacacacatctctcccaattcgacatctttggttgagttttgatgaagggagatcttggagcaaatacagtttcacatctattccactttttgtggatggggttctgggtgagcctggagaagagactctcatcatgacagtgtttggacacttcagccaccgctctgaatggcagctggtcaaagtagattacaagtccatttttgatagacggtgtgccgaagaggactacagaccttggcagctgcacagccagggggaagcatgtatcatgggagcaaaaaggatatataagaagcgaaaatcagagcggaagtgtatgcaaggaaaatatgcaggagctatggaatctgaaccctgtgtctgcactgaggctgattttgattgcgactatggttatgagcgacacagcaatggccagtgcctgccggcattttggttcaatccatcctctctgtcaaaggattgcagcttgggacagagttacctcaatagtactgggtacaggaaggtggtttccaataattgcactgatggcgtaagggaacagtacactgccaaaccgcagaagtgcccagggaaagccccgcgggggctgcggatagtcacggctgatggaaagctgacagcggaacaaggacacaacgtcactctcatggtgcaattagaagagggtgatgttcagcggacactcatccaagtggactttggcgatggtatcgcggtgtcttacgtcaatctcagctccatggaagatgggatcaaacacgtctatcagaacgtgggcattttccgtgtgaccgtgcaggtggacaacagtctgggttctgacagcgccgtcctgtacttacatgtaacttgtcccttggagcacgtgcacctgtctcttccctttgtcaccacaaagaacaaagaggtcaatgcgacggcagtgctgtggcccagccaagtgggcaccctcacttacgtgtggtggtacggaaacaacacggagcctttgatcaccttggagggaagcatatccttcagatttacttcagaaggaatgaataccatcacagtgcaggtctcagctgggaatgccatcctacaagacacaaagaccatcgcagtatatgaggaattccggtctcttcgcttgtccttttctccaaacctggatgactacaacccggacatccctgagtggaggagggacatcggtcgagtcatcaaaaaatccctggtggaagccacaggggttccaggccagcacatcctggtggcggtgctccctggcttacccaccactgctgaactctttgtcctaccctatcaggatccagctggagaaaacaaaaggtcaactgatgacctggagcagatatcagaattgctgatccacacgctcaaccaaaactcagtacacttcgagctgaagccaggagtccgagtccttgtccatgctgctcacttaacagcggcccccctggtggacctcactccaacccacagtggatctgccatgctgatgctgctctcagtggtgtttgtggggctggcagtgttcgtcatctacaagtttaaaaggaagatcccggggattaatgtttatgcccagatgcagaatgagaaagaacaagagatgatcagtccagtcagtcactctgaaagcaggcccaatgtccctcagactgaactaaggaggcctggccagcttatagatgagaaggtggaatcccagctcatagaagttccaaacagcaactttgagagcagtggggtgcttggcagctgttctgtgttttccaggaatccaactgagcattgaaatctctcatttgccgacttatttttataggaagccaattaaaaaaaaaaaaagttttcttatagtattggaactacttctaattttaaaatgacttttttgatgtattttttgttaaatactatgtagtgtaatgtataattgctcttgtttattgcttttacaatcatatttattaaacagataatgtctctaaagtctttgcctcaggtatttttttttttaatcctaaacccttggtgttcattctaaatatagaagtgttgcatgtataggatttcataaaggctaattgcataagaaagagtaaacaccacaggcttgaggtttttggctgttttttactaacaaggcagaatgtatgtactacctgaattctacctgcatttcaattaactatacaatgtctgtttattaaattactttgatttaaaaatta

SEQ ID NO: 604 - DNA, 4452 bp, Homo sapiens
ttattttccccggagagtcccgaggcgccgcgccttggccctgcctacagcccgaggccccgcccccggcgcccctcccagccgtttgaagcggctcgggctgcggctggctcagagtggcgcggggggcgtggggcggtgctgaggagctgaagccgtggccagctcgacgccggacagtccagcgagcagcacggcgggaaccggcagccggagcagtcccggagcagaagcagcagcagcagcagcagccctcgccgttcgcggagcgcagccgagccggccatggcgttgtcgatgccgctgaatgggctgaaggaggaggacaaagagcccctcatcgagctcttcgtcaaggctggcagtgatggtgaaagcataggaaactgccccttttcccagaggctcttcatgattctttggctcaaaggagttgtatttagtgtgacgactgttgacctgaaaaggaagccagcagacctgcagaacttggctcccgggacccacccaccatttataactttcaacagtgaagtcaaaacggatgtaaataagattgaggaatttcttgaagaagtcttatgccctcccaagtacttaaagctttcaccaaaacacccagaatcaaatactgctggaatggacatctttgccaaattctctgcatatatcaagaattcaaggccagaggctaatgaagcactggagaggggtctcctgaaaaccctgcagaaactggatgaatatctgaattctcctctccctgatgaaattgatgaaaatagtatggaggacataaagttttctacacgtaaatttctggatggcaatgaaatgacattagctgattgcaacctgctgcccaaactgcatattgtcaaggtggtggccaaaaaatatcgcaactttgatattccaaaagaaatgactggcatctggagatacctaactaatgcatacagtagggacgagttcaccaatacctgtcccagtgataaggaggttgaaatagcatatagtgatgtagccaaaagactcaccaagtaaaatcgcgtttgtaaaagagatgtcttcatgtcttcccctaagaatacgcttttcctaacaggctactccttcctgtagagcagaaattgtattttgcacgaacatgcagttattgaagattaggatcaaggatagacaaggtatagtagttatcttaaaatatacactcctaagcagtattattttaaaatcctttaccctggctacctcccctacccgggttcccctctctttaatttggagacactccaccacaaacttttcactttagaggtagcttgccatctctcaggagccctcaccattgtgtccattcactgtgtatagatggcagaacttttgaggtgcaatgtttaattgttaaaaatagtagccacgactttatcaggcagccccaaactggtgcataatgcatggtacaagaaatatttatgtattttttggaattttgtaatatttagtaagagtatatgaaaggattgctactgtatcagaaatattgtttcaatttagtctatcctggatatgtactaacgaatattaccaccagagaagagagctttctacaaaagtcactacagattttgctatattgctttgtagatagatttttacttttgcctaaaagcatttatccttcataccaattgtaacatctgacaccatgtagaagctaaaagtttagagggagtgagggttttctcaagaccttcctcaagcattttatctttagaagagaaactgatgggcacctgatactctgtctaaatacgtttgttatatgtgttttgccctgtgccattcatttggaactttattgcattctttattttaaaaagcttgtttttacgtaatcatagagcttgctatttgtacatctgttgagcaacactacataactgatttttagttgacttagctatagcagtacaatgattagtaatgtaaaaattaacacagaaattaacctaaggaatgaagggtgggtttgtcaaaatatcaagtaaatttttgtttctaaagtacatttaatgtagatgacctaaagaatgcgttatccatcctatataaaagaaagataaaacacaggtcaccaattttctcatttcaccccatttaccttgtatagaggattgttcattcctttgggactaagttatagttatggtgagtgtgtatttactgtagttttgcctgatctcactcattgcacttcctggagttaaattttccaacagccatgttgaggaatagcactctgcatgtttttgttttgtttttcggggttttttttaattgaagccctaaaccaggaattatttgtgttctaacaggaggatgaacttgctgaaaataaaactttgctatgtatttactcttttttaaaagacaaaagcaaaaccagactttctacgtactactccaaagactgtgattgtgactataatacatttttggtaatttttttatacctaatttgtataggaagtgctatttctcataggctgtttcttgaaattttaagtttattgctttaaaatggcagtgtttctcccactttgatatgctaacatttagtaagcactggctttatgaaagcggctttttataagtatactgcattttttgagcctatcattaattagcttagtatgaaagataagaaaatctccatgttgtatccatttggctcaggaagattctttgccttacctttcttagaactctttattgcttatcaaaagtttgagtacccgcttggtttttttttggtaattaaatattgtatgatttatctggttcaaggaagatgcactattcagttatctattgagaaattattttgcagtggttttagtgggtgaaaatgtcccatctgcaccagtacacaggcaggcattatcattcttcacctactttttaaatagtggcaacttgggattcattctggtgattctgaaccttgcctcatagcttaaagtataaaaaagattcaagagcagtgaggtttgttctttccagtgaatggtggactgagtggtgcgaggtggagggctaacaagaggaaagaactacattcttcagaatacagtgatgaaaattcattttgaaactcaaatattttcattttggatattctcctgtttttattaaaccagtgattacacctggccatccctctaaatgttctaggaaggcatgtctattgtgattttgatgaagacagaattatttttctctgtagaaacacagataccactttatcagggaagttagtcaaatgaaatggaaattggtaaatggacaaaagctagctagtaaaaaggacgacccagcaacatgctttaaccccattgtatgtttgtggaaagagcatagtttaacatcttgagaaatttgggacataaagttttcatggtagacagttcatgcagtatatgaattgccataatggaaataatctgattttatttttacaactaacatccattccccttcatttaaacaccttttgtgttttacttcagtgaggagattggagtctgaatggatctgttttccaagagattctgagaaatttttgtattcagcagttggaaagctctctattctagttgataaaacttcccttttttgatgtagatgcagatattctatacagttctgttgtcttttactaggactgtaaacttttgtgataaaattcaaataagattttatttcttggtaattttggctttcacaatttatctttaaatccttgagcaatctgtatacaattaagagatttctgacatttattcttacactaaatggatcaactctaggatttaggcatgttaacttctgttgtgttttgaatctctccagagttgcatgtagatagcatttatttctgtgcccttaaacccatttagaaaataactacaaagtaaaaatgtagaggaaatagaaatgtattttttcatgaacattttgatacaaatttcatcatttaatgattcaccaatttcttgcattaatttgaatttaagcatttaattcaaagagaggggagcatccattattgatacatgtgggcttttaaaaactccatcctttataaatagtcaaggtttgggccacacaaagtatatttttatcatggaaaaatttcaactcctcaagccgtaatgttgaacagaattggagtattttctttataatttcttgaacaggcaaatgaaagcttattatagaatgcatgtattttcttttatctttggaacatcagcaccagtatattgctggcagctattgtattaaaaaataaagtatattttcactatcataaaggattcttttttcccccctcatgaaaataaacaacaacttggggtaaaagtgaaaaaaaaaaaaaaaaaa

SEQ ID NO: 605 - DNA, 3658 bp, Homo sapiens
aacccatttcaactgcctattcagagcatgcagtaagaggaaatccaccaagtctcaatataataatattctttattcctggacagctcggttaatgaaaaaatggacacagaaagtaataggagagcaaatcttgctctcccacaggagccttccagtgtgcctgcatttgaagtcttggaaatatctccccaggaagtatcttcaggcagactattgaagtcggcctcatccccaccactgcatacatggctgacagttttgaaaaaagagcaggagttcctgggggtaacacaaattctgactgctatgatatgcctttgttttggaacagttgtctgctctgtacttgatatttcacacattgagggagacattttttcatcatttaaagcaggttatccattctggggagccatatttttttctatttctggaatgttgtcaattatatctgaaaggagaaatgcaacatatctggtgagaggaagcctgggagcaaacactgccagcagcatagctgggggaacgggaattaccatcctgatcatcaacctgaagaagagcttggcctatatccacatccacagttgccagaaattttttgagaccaagtgctttatggcttccttttccactgaaattgtagtgatgatgctgtttctcaccattctgggacttggtagtgctgtgtcactcacaatctgtggagctggggaagaactcaaaggaaacaaggttccagaggatcgtgtttatgaagaattaaacatatattcagctacttacagtgagttggaagacccaggggaaatgtctcctcccattgatttataagaatcacgtgtccagaacactctgattcacagccaaggatccagaaggccaaggtcttgttaaggggctactggaaaaatttctattctctccacagcctgctggttttacattagatttattcgcctgataagaatattttgtttctgctgcttctgtccaccttaatattctccttctatttgtagatatgatagactcctatttttcttgttttatattatgaccacacacatctctgctggaaagtcaacatgtagtaagcaagatttaactgtttgattataactgtgcaaatacagaaaaaaagaaggctggctgaaagttgagttaaactttgacagtttgataatatttggttcttagggtttttttttttttttagcattcttaatagttacagttgggcatgatttgtaccatccacccatacccacacagtcacagtcacacacacatatgtattacttacactatatataacttcctatgcaaatattttaccaccagtcaataatacatttttgccaagacatgaagttttataaagatctgtataattgcctgaatcaccagcacattcactgacatgatattatttgcagattgacaagtaggaagtggggaattttattaagttactcgttgtctggggaggtaaataggttaaaaacagggaaattataagtgcagagattaacatttcacaaatgtttagtgaaacatttgtgaaaaaagaagactaaattaagacctgagctgaaataaagtgagtggaaatggaaataatggttatatctaaaacatgtagaaaaagagtaactggtagattttgttaacaaattaaagaataaagttagacaagcaactggttgactaatacattaagcgtttgagtctaagatgaaaggagaacactggttatgttgatagaatgataaaaagggtcgggcgcggaggctcacgcctgtaatcccagccctttgggaggccgaggtgggcagatcacgaagtcagtagtttgagaccagcctggccaacatagtgaaaccccgtctctactaaaaatacaaaaaaaaaattagctgggtgtggtggcagtcacctgtagtcccagctacttgggaggctgaggcaggagaatcgcttcaacctgggaggcggaggttgcagtgagccgagatcgcaccagtgcactccagccttggtgacaatgggagactccatctcaaaaaaaaaaaaaaaaaaaaaaaagataaaaagtcagaaatctgaaaagtggaggaagagtacaaatagacctaaattaagctcatttttaggctttgattttggggagacaaagggaaatgcagccatagagggcctgatgacatccaatacagagttctggtaaagataaaatttgatacaggtttggtgtcattataagagaaatcattattaaatgaagcaagttaacactctaagagaattattttgagatagaagtgaagctaagctaaacttcacatgcctataattggagggaaaaactaaggataaaatctagcctagaagatacaataattagtcataaacatgcattgtgaaactgtagagagcaggtagcccaaaatagagaaagattagataaagagaaaataagtatccatcagagacagtatctctaggcttgggcaagagaaaagtccacagtgataagcaactccacctaaggcatgaatatgcggcagagaaaacagcaatagtgaatgaatgcaaaaggtgctgagaaattccacacatgagtattgtgatgagtaaatgaataaaacatttgcaaagacctttagagaaagagaatgggagcatatgtgagaaataagatagttgattatgaatagaaggtagtgaagaaaagcaagctaagaaaaaattctgtttataaaagaaggaaaagatagtttatgtttttagcctaagtataagagtcctacagatggactgaaaaaaatcagtctgagagtattagtcacaattaatgaaataattacattttatgtattgaggatgccaagattaaaaggtgacaggtagatgttaatttccctagattgtgaaagtgatcacgacaatcacacaacaaataattaagtgacttggtatgctttatttaattgtagggcctgaggttttccattctcatttttctaaaatacaattttgtttctccaaatttgacagcagaataaaaaccctaccctttcactgtgtatcatgctaagctgcatctctactcttgatcatctgtaggtattaatcacatcacttccatggcatggatgttcacatacagactcttaaccctggtttaccaggacctctaggagtggatccaatctatatctttacagttgtatagtatatgatatctcttttatttcactcaatttatattttcatcattgactacatatttcttatacacaacacacaatttatgaattttttctcaagatcattctgagagttgccccaccctacctgccttttatagtatgcccacctcaggcagacacagagcacaatgctggggttctcttcacactatcactgccccaaattgtctttctaaatttcaacttcaatgtcatcttctccatgaagaccactgaatgaacaccttttcatccagccttaatttcttgctccataactactctatcccacgatgcagtattgtatcattaattattagtgtgcttgtgacctccttatgtattctcaattacctgtatttgtgcaataaattggaataatgtaacttgaaaaaaaaaaa

SEQ ID NO: 606 - protein, 244 aa, Homo sapiens
MDTESNRRANLALPQEPSSVPAFEVLEISPQEVSSGRLLKSASSPPLHTWLTVLKKEQEFLGVTQILTAMICLCFGTVVCSVLDISHIEGDIFSSFKAGYPFWGAIFFSISGMLSIISERRNATYLVRGSLGANTASSIAGGTGITILIINLKKSLAYIHIHSCQKFFETKCFMASFSTEIVVMMLFLTILGLGSAVSLTICGAGEELKGNKVPEDRVYEELNIYSATYSELEDPGEMSPPIDL

SEQ ID NO: 607 - DNA, 3529 bp, Homo sapiens
aacccatttcaactgcctattcagagcatgcagtaagaggaaatccaccaagtctcaatataataatattctttattcctggacagctcggttaatgaaaaaatggacacagaaagtaataggagagcaaatcttgctctcccacaggagccttccagtgtgcctgcatttgaagtcttggaaatatctccccaggaagtatcttcaggcagactattgaagtcggcctcatccccaccactgcatacatggctgacagttttgaaaaaagagcaggagttcctggggttttctatttctggaatgttgtcaattatatctgaaaggagaaatgcaacatatctggtgagaggaagcctgggagcaaacactgccagcagcatagctgggggaacgggaattaccatcctgatcatcaacctgaagaagagcttggcctatatccacatccacagttgccagaaattttttgagaccaagtgctttatggcttccttttccactgaaattgtagtgatgatgctgtttctcaccattctgggacttggtagtgctgtgtcactcacaatctgtggagctggggaagaactcaaaggaaacaaggttccagaggatcgtgtttatgaagaattaaacatatattcagctacttacagtgagttggaagacccaggggaaatgtctcctcccattgatttataagaatcacgtgtccagaacactctgattcacagccaaggatccagaaggccaaggtcttgttaaggggctactggaaaaatttctattctctccacagcctgctggttttacattagatttattcgcctgataagaatattttgtttctgctgcttctgtccaccttaatattctccttctatttgtagatatgatagactcctatttttcttgttttatattatgaccacacacatctctgctggaaagtcaacatgtagtaagcaagatttaactgtttgattataactgtgcaaatacagaaaaaaagaaggctggctgaaagttgagttaaactttgacagtttgataatatttggttcttagggtttttttttttttttagcattcttaatagttacagttgggcatgatttgtaccatccacccatacccacacagtcacagtcacacacacatatgtattacttacactatatataacttcctatgcaaatattttaccaccagtcaataatacatttttgccaagacatgaagttttataaagatctgtataattgcctgaatcaccagcacattcactgacatgatattatttgcagattgacaagtaggaagtggggaattttattaagttactcgttgtctggggaggtaaataggttaaaaacagggaaattataagtgcagagattaacatttcacaaatgtttagtgaaacatttgtgaaaaaagaagactaaattaagacctgagctgaaataaagtgagtggaaatggaaataatggttatatctaaaacatgtagaaaaagagtaactggtagattttgttaacaaattaaagaataaagttagacaagcaactggttgactaatacattaagcgtttgagtctaagatgaaaggagaacactggttatgttgatagaatgataaaaagggtcgggcgcggaggctcacgcctgtaatcccagccctttgggaggccgaggtgggcagatcacgaagtcagtagtttgagaccagcctggccaacatagtgaaaccccgtctctactaaaaatacaaaaaaaaaattagctgggtgtggtggcagtcacctgtagtcccagctacttgggaggctgaggcaggagaatcgcttcaacctgggaggcggaggttgcagtgagccgagatcgcaccagtgcactccagccttggtgacaatgggagactccatctcaaaaaaaaaaaaaaaaaaaaaaaagataaaaagtcagaaatctgaaaagtggaggaagagtacaaatagacctaaattaagctcatttttaggctttgattttggggagacaaagggaaatgcagccatagagggcctgatgacatccaatacagagttctggtaaagataaaatttgatacaggtttggtgtcattataagagaaatcattattaaatgaagcaagttaacactctaagagaattattttgagatagaagtgaagctaagctaaacttcacatgcctataattggagggaaaaactaaggataaaatctagcctagaagatacaataattagtcataaacatgcattgtgaaactgtagagagcaggtagcccaaaatagagaaagattagataaagagaaaataagtatccatcagagacagtatctctaggcttgggcaagagaaaagtccacagtgataagcaactccacctaaggcatgaatatgcggcagagaaaacagcaatagtgaatgaatgcaaaaggtgctgagaaattccacacatgagtattgtgatgagtaaatgaataaaacatttgcaaagacctttagagaaagagaatgggagcatatgtgagaaataagatagttgattatgaatagaaggtagtgaagaaaagcaagctaagaaaaaattctgtttataaaagaaggaaaagatagtttatgtttttagcctaagtataagagtcctacagatggactgaaaaaaatcagtctgagagtattagtcacaattaatgaaataattacattttatgtattgaggatgccaagattaaaaggtgacaggtagatgttaatttccctagattgtgaaagtgatcacgacaatcacacaacaaataattaagtgacttggtatgctttatttaattgtagggcctgaggttttccattctcatttttctaaaatacaattttgtttctccaaatttgacagcagaataaaaaccctaccctttcactgtgtatcatgctaagctgcatctctactcttgatcatctgtaggtattaatcacatcacttccatggcatggatgttcacatacagactcttaaccctggtttaccaggacctctaggagtggatccaatctatatctttacagttgtatagtatatgatatctcttttatttcactcaatttatattttcatcattgactacatatttcttatacacaacacacaatttatgaattttttctcaagatcattctgagagttgccccaccctacctgccttttatagtatgcccacctcaggcagacacagagcacaatgctggggttctcttcacactatcactgccccaaattgtctttctaaatttcaacttcaatgtcatcttctccatgaagaccactgaatgaacaccttttcatccagccttaatttcttgctccataactactctatcccacgatgcagtattgtatcattaattattagtgtgcttgtgacctccttatgtattctcaattacctgtatttgtgcaataaattggaataatgtaacttgaaaaaaaaaaaaaaaaa

SEQ ID NO: 608 - protein, 199 aa, Homo sapiens
MDTESNRRANLALPQEPSSVPAFEVLEISPQEVSSGRLLKSASSPPLHTWLTVLKKEQEFLGFSISGMLSIISERRNATYLVRGSLGANTASSIAGGTGITILIINLKKSLAYIHIHSCQKFFETKCFMASFSTEIVVMMLFLTILGLGSAVSLTICGAGEELKGNKVPEDRVYEELNIYSATYSELEDPGEMSPPIDL

SEQ ID NO: 609 - DNA, 1239 bp, Homo sapiens
atgggcagcccctggaacggcagcgacggccccgagggggcgcgggagccgccgtggcccgcgctgccgccttgcgacgagcgccgctgctcgccctttcccctgggggcgctggtgccggtgaccgctgtgtgcctgtgcctgttcgtcgtcggggtgagcggcaacgtggtgaccgtgatgctgatcgggcgctaccgggacatgcggaccaccaccaacttgtacctgggcagcatggccgtgtccgacctactcatcctgctcgggctgccgttcgacctgtaccgcctctggcgctcgcggccctgggtgttcgggccgctgctctgccgcctgtccctctacgtgggcgagggctgcacctacgccacgctgctgcacatgaccgcgctcagcgtcgagcgctacctggccatctgccgcccgctccgcgcccgcgtcttggtcacccggcgccgcgtccgcgcgctcatcgctgtgctctgggccgtggcgctgctctctgccggtcccttcttgttcctggtgggcgtcgagcaggaccccggcatctccgtagtcccgggcctcaatggcaccgcgcggatcgcctcctcgcctctcgcctcgtcgccgcctctctggctctcgcgggcgccaccgccgtccccgccgtcggggcccgagaccgcggaggccgcggcgctgttcagccgcgaatgccggccgagccccgcgcagctgggcgcgctgcgtgtcatgctgtgggtcaccaccgcctacttcttcctgccctttctgtgcctcagcatcctctacgggctcatcgggcgggagctgtggagcagccggcggccgctgcgaggcccggccgcctcggggcgggagagaggccaccggcagaccgtccgcgtcctgctggtggtggttctggcatttataatttgctggttgcccttccacgttggcagaatcatttacataaacacggaagattcgcggatgatgtacttctctcagtactttaacatcgtcgctctgcaacttttctatctgagcgcatctatcaacccaatcctctacaacctcatttcaaagaagtacagagcggcggcctttaaactgctgctcgcaaggaagtccaggccgagaggcttccacagaagcagggacactgcgggggaagttgcaggggacactggaggagacacggtgggctacaccgagacaagcgctaacgtgaagacgatgggataa

SEQ ID NO: 610 - protein, 412 aa, Homo sapiens
MGSPWNGSDGPEGAREPPWPALPPCDERRCSPFPLGALVPVTAVCLCLFVVGVSGNVVTVMLIGRYRDMRTTTNLYLGSMAVSDLLILLGLPFDLYRLWRSRPWVFGPLLCRLSLYVGEGCTYATLLHMTALSVERYLAICRPLRARVLVTRRRVRALIAVLWAVALLSAGPFLFLVGVEQDPGISVVPGLNGTARIASSPLASSPPLWLSRAPPPSPPSGPETAEAAALFSRECRPSPAQLGALRVMLWVTTAYFFLPFLCLSILYGLIGRELWSSRRPLRGPAASGRERGHRQTVRVLLVVVLAFIICWLPFHVGRIIYINTEDSRMMYFSQYFNIVALQLFYLSASINPILYNLISKKYRAAAFKLLLARKSRPRGFHRSRDTAGEVAGDTGGDTVGYTETSANVKTMG

SEQ ID NO: 611 - DNA, 2978 bp, Homo sapiens
cgtcctatctgcagtcggctactttcagtggcagaagaggccacatctgcttcctgtaggccctctgggcagaagcatgcgctggtgtctcctcctgatctgggcccaggggctgaggcaggctcccctcgcctcaggaatgatgacaggcacaatagaaacaacggggaacatttctgcagagaaaggtggctctatcatcttacaatgtcacctctcctccaccacggcacaagtgacccaggtcaactgggagcagcaggaccagcttctggccatttgtaatgctgacttggggtggcacatctccccatccttcaaggatcgagtggccccaggtcccggcctgggcctcaccctccagtcgctgaccgtgaacgatacaggggagtacttctgcatctatcacacctaccctgatgggacgtacactgggagaatcttcctggaggtcctagaaagctcagtggctgagcacggtgccaggttccagattccattgcttggagccatggccgcgacgctggtggtcatctgcacagcagtcatcgtggtggtcgcgttgactagaaagaagaaagccctcagaatccattctgtggaaggtgacctcaggagaaaatcagctggacaggaggaatggagccccagtgctccctcacccccaggaagctgtgtccaggcagaagctgcacctgctgggctctgtggagagcagcggggagaggactgtgccgagctgcatgactacttcaatgtcctgagttacagaagcctgggtaactgcagcttcttcacagagactggttagcaaccagaggcatcttctggaagatacacttttgtctttgctattatagatgaatatataagcagctgtactctccatcagtgctgcgtgtgtgtgtgtgtgtgtatgtgtgtgtgtgttcagttgagtgaataaatgtcatcctcttctccatcttcatttccttggccttttcgttctattccattttgcattatggcaggcctagggtgagtaacgtggatcttgatcataaatgcaaaattaaaaaatatcttgacctggttttaaatctggcagtttgagcagatcctatgtctctgagagacacattcctcataatggccagcattttgggctacaaggttttgtggttgatgatgaggatggcatgactgcagagccatcctcatctcattttttcacgtcattttcagtaactttcactcattcaaaggcaggttataagtaagtcctggtagcagcctctatggggagatttgagagtgactaaatcttggtatctgccctcaagaacttacagttaaatggggagacaatgttgtcatgaaaaggtattatagtaaggagagaaggagacatacacaggccttcaggaagagacgacagtttggggtgaggtagttggcataggcttatctgtgatgaagtggcctgggagcaccaaggggatgttgaggctagtctgggaggagcaggagttttgtctagggaacttgtaggaaattcttggagctgaaagtcccacaaagaaggccctggcaccaagggagtcagcaaacttcagattttattctctgggcaggcatttcaagtttccttttgctgtgacatactcatccattagacagcctgatacaggcctgtagcctcttccggccgtgtgtgctggggaagccccaggaaacgcacatgcccacacagggagccaagtcgtagcatttgggccttgatctaccttttctgcatcaatacactcttgagcctttgaaaaaagaacgtttcccactaaaaagaaaatgtggatttttaaaatagggactcttcctaggggaaaaaggggggctgggagtgatagagggtttaaaaaataaacaccttcaaactaacttcttcgaacccttttattcactccctgacgactttgtgctggggttggggtaactgaaccgcttatttctgtttaattgcattcaggctggatcttagaagacttttatccttccaccatctctctcagaggaatgagcggggaggttggatttactggtgactgattttctttcatgggccaaggaactgaaagagaatgtgaagcaaggttgtgtcttgcgcatggttaaaaataaagcattgtcctgcttcctaagacttagactggggttgacaattgttttagcaacaagacaattcaactatttctcctaggatttttattattattattttttcacttttctaccaaatgggttacataggaagaatgaactgaaatctgtccagagctccaagtcctttggaagaaagattagatgaacgtaaaaatgttgttgtttgctgtggcagtttacagcatttttcttgcaaaattagtgcaaatctgttggaaatagaacacaattcacaaattggaagtgaactaaaatgtaatgacgaaaagggagtagtgttttgatttggaggaggtgtatattcggcagaggttggactgagagttgggtgttatttaacataattatggtaattgggaaacatttataaacactattgggatggtgataaaatacaaaagggcctatagatgttagaaatgggtcaggttactgaaatgggattcaatttgaaaaaaatttttttaaatagaactcactgaactagattctcctctgagaaccagagaagaccatttcatagttggattcctggagacatgcgctatccaccacgtagccactttccacatgtggccatcaaccacttaagatggggttagtttaaatcaagatgtgctgttataattggtataagcataaaatcacactagattctggagatttaatatgaataataagaatactatttcagtagttttggtatattgtgtgtcaaaaatgataatattttggatgtattgggtgaaataaaatattaacattaaaaaaaaaaa

SEQ ID NO: 612 - protein, 244 aa, Homo sapiens
MRWCLLLIWAQGLRQAPLASGMMTGTIETTGNISAEKGGSIILQCHLSSTTAQVTQVNWEQQDQLLAICNADLGWHISPSFKDRVAPGPGLGLTLQSLTVNDTGEYFCIYHTYPDGTYTGRIFLEVLESSVAEHGARFQIPLLGAMAATLVVICTAVIVVVALTRKKKALRIHSVEGDLRRKSAGQEEWSPSAPSPPGSCVQAEAAPAGLCGEQRGEDCAELHDYFNVLSYRSLGNCSFFTETG

SEQ ID NO: 613 - DNA, 2872 bp, Homo sapiens
aaatcagcatgtttattatttttaaaaaattagggcctggattttgacaatgtcaagatttaccgtatatccctgtttgtttggatacaccagtgacgtccacttctagaagacaaagttatattacttaaacaaccaaagatggagtctcgctcttcgcccaggctggagtgcagtggcgcgatctcggctcactgcagtcttcacctcccagattcaagcgatttccagctaatttttgtatttttagtagagatgggatttcaccatgttggccaagctggacttgaactcctgatctcaagtgatctgcccacctcagcctcccaaagtgctggtattacagatatgaaactatccatgaagaacaatattatcaatacacagcagtcttttgtaaccatgcccaatgtgattgtaccagatattgaaaaggaaatacgaaggatggaaaatggagcatgcagctccttttctgaggatgatgacagtgcctctacatctgaagaatcagagaatgaaaaccctcatgcaaggggttcctttagttataagtcactcagaaagggaggaccatcacagagggagcagtacctgcctggtgccattgcactttttaatgtgaacaacagcagcaataaggaccaggaaccagaagaaaaaaagaaaaagaaaaaagaaaagaagagcaagtcagatgataaaaacgaaaataaaaacgacccagagaagaaaaagaagaaaaaggacaaagagaagaaaaagaaagaggagaaaagcaaagataagaaagaagaggagaagaaagaagttgtggttattgatccctcgggaaacacatattacaactggctgttttgcatcacattacctgttatgtacaactggacaatggttattgccagagcatgttttgatgaacttcaatctgattacctagaatattggctcattttggattacgtatcagacatagtctatttaatcgatatgtttgtacgaacaaggacaggttacctagaacaaggactgctggtaaaggaagaacttaaactcataaataaatataaatccaacttgcaatttaaacttgatgttctgtcactgataccaactgatttgctgtattttaagttagggtggaactatccagaaattagattaaacaggttgttacggttctctcgtatgtttgagttcttccagagaacagaaacaaggacaaactatccaaacatcttcaggatttccaaccttgttatgtatatcgtcatcattatccactggaatgcatgtgtgttctactctatttctaaagctattggatttggaaatgatacatgggtctaccctgatattaatgatcctgaatttggccgtttggctagaaaatacgtatacagcctttactggtctacactgactttgactaccattggtgaaacaccccctcccgtgagggattctgagtatgtctttgtggtggttgatttcctaattggagtgttaatttttgctaccatcgttggtaacataggttctatgatttccaacatgaatgcagccagagcagaatttcaagcaagaattgatgctatcaagcaatatatgcattttcgaaatgtaagcaaagatatggaaaagagggttattaaatggtttgactacctgtggaccaacaaaaaaacagttgatgagaaagaagtcttaaagtatctacctgataaactaagagcagaaattgccatcaacgttcacttagacacattaaaaaaggtacgcatttttgctgattgtgaagctggtctgttggtggagttggtcttgaaattgcaaccccaagtctacagtcctggagattatatttgcaagaaaggggatatcggacgagagatgtacattatcaaggaaggcaaactcgctgtggtggcagatgatggagtcactcagtttgtggtattgagcgatggcagctacttcggtgagatcagcattcttaacattaaagggagcaaagctggcaatcgaagaacggccaatattaaaagtattggctactcagacctgttctgtctctcaaaagatgacctcatggaagctctaactgagtacccagatgccaaaactatgctggaagagaaagggaagcagattttaatgaaagatggtctactggatctaaacattgcaaatgctggcagtgatcctaaagatcttgaagagaaggttactcgaatggaggggtcagtagacctcctgcaaaccaggtttgcccgaatcttggctgagtatgagtccatgcagcagaaactgaaacaaagattaaccaaggttgagaaatttctgaaaccgcttattgacacagaattttcaagtattgagggacctggagcggaaagtgggcccatcgactctacatagaaccgaaaagctggtcattaacagggacatgcctcatgatccttttgatcctatgactgacatcaactaaaatttaaaagaagaggaagactcagttgggaaatttttccatgaggaaaatgtgctttggtgcaaggtacaaggcccacaccctctctgagagatactatgattaaaaaagctttatatcttgggatttttcacaactgataatgtgcaaagatataaactgattaacttgtcagtgtctgtattttctgattttttcacatacgctcattttatgtaatattcttcataaaaatgaataagtagccctcactttcatgccatttccattgttgagtgaagcgtatttgaagtaactgagaattaccatgtacatcatatttgggataacatttttaaaaattagactgcaataaagtaaaattaattatgcaaaaaaaaa

SEQ ID NO: 614 - protein, 759 aa, Homo sapiens
MESRSSPRLECSGAISAHCSLHLPDSSDFQLIFVFLVEMGFHHVGQAGLELLISSDLPTSASQSAGITDMKLSMKNNIINTQQSFVTMPNVIVPDIEKEIRRMENGACSSFSEDDDSASTSEESENENPHARGSFSYKSLRKGGPSQREQYLPGAIALFNVNNSSNKDQEPEEKKKKKKEKKSKSDDKNENKNDPEKKKKKKDKEKKKKEEKSKDKKEEEKKEVVVIDPSGNTYYNWLFCITLPVMYNWTMVIARACFDELQSDYLEYWLILDYVSDIVYLIDMFVRTRTGYLEQGLLVKEELKLINKYKSNLQFKLDVLSLIPTDLLYFKLGWNYPEIRLNRLLRFSRMFEFFQRTETRTNYPNIFRISNLVMYIVIIIHWNACVFYSISKAIGFGNDTWVYPDINDPEFGRLARKYVYSLYWSTLTLTTIGETPPPVRDSEYVFVVVDFLIGVLIFATIVGNIGSMISNMNAARAEFQARIDAIKQYMHFRNVSKDMEKRVIKWFDYLWTNKKTVDEKEVLKYLPDKLRAEIAINVHLDTLKKVRIFADCEAGLLVELVLKLQPQVYSPGDYICKKGDIGREMYIIKEGKLAVVADDGVTQFVVLSDGSYFGEISILNIKGSKAGNRRTANIKSIGYSDLFCLSKDDLMEALTEYPDAKTMLEEKGKQILMKDGLLDLNIANAGSDPKDLEEKVTRMEGSVDLLQTRFARILAEYESMQQKLKQRLTKVEKFLKPLIDTEFSSIEGPGAESGPIDST

SEQ ID NO: 615 - DNA, 2790 bp, Homo sapiens
tttttcctgcttcttgaatggtagagagcagtctatagccagagactcgtccctagctcgagctgagctttcgcttgccgtccaccactgcccaccactgtcgtttgctgccatcgcagacctgctgctgacttccatccctctggatccggcaagggcctggattttgacaatgtcaagatttaccgtatatccctgtttgtttggatacaccagtgacgtccacttctagaagacaaagttatattacttaaacaaccaaagatatgaaactatccatgaagaacaatattatcaatacacagcagtcttttgtaaccatgcccaatgtgattgtaccagatattgaaaaggaaatacgaaggatggaaaatggagcatgcagctccttttctgaggatgatgacagtgcctctacatctgaagaatcagagaatgaaaaccctcatgcaaggggttcctttagttataagtcactcagaaagggaggaccatcacagagggagcagtacctgcctggtgccattgcactttttaatgtgaacaacagcagcaataaggaccaggaaccagaagaaaaaaagaaaaagaaaaaagaaaagaagagcaagtcagatgataaaaacgaaaataaaaacgacccagagaagaaaaagaagaaaaaggacaaagagaagaaaaagaaagaggagaaaagcaaagataagaaagaagaggagaagaaagaagttgtggttattgatccctcgggaaacacatattacaactggctgttttgcatcacattacctgttatgtacaactggacaatggttattgccagagcatgttttgatgaacttcaatctgattacctagaatattggctcattttggattacgtatcagacatagtctatttaatcgatatgtttgtacgaacaaggacaggttacctagaacaaggactgctggtaaaggaagaacttaaactcataaataaatataaatccaacttgcaatttaaacttgatgttctgtcactgataccaactgatttgctgtattttaagttagggtggaactatccagaaattagattaaacaggttgttacggttctctcgtatgtttgagttcttccagagaacagaaacaaggacaaactatccaaacatcttcaggatttccaaccttgttatgtatatcgtcatcattatccactggaatgcatgtgtgttctactctatttctaaagctattggatttggaaatgatacatgggtctaccctgatattaatgatcctgaatttggccgtttggctagaaaatacgtatacagcctttactggtctacactgactttgactaccattggtgaaacaccccctcccgtgagggattctgagtatgtctttgtggtggttgatttcctaattggagtgttaatttttgctaccatcgttggtaacataggttctatgatttccaacatgaatgcagccagagcagaatttcaagcaagaattgatgctatcaagcaatatatgcattttcgaaatgtaagcaaagatatggaaaagagggttattaaatggtttgactacctgtggaccaacaaaaaaacagttgatgagaaagaagtcttaaagtatctacctgataaactaagagcagaaattgccatcaacgttcacttagacacattaaaaaaggtacgcatttttgctgattgtgaagctggtctgttggtggagttggtcttgaaattgcaaccccaagtctacagtcctggagattatatttgcaagaaaggggatatcggacgagagatgtacattatcaaggaaggcaaactcgctgtggtggcagatgatggagtcactcagtttgtggtattgagcgatggcagctacttcggtgagatcagcattcttaacattaaagggagcaaagctggcaatcgaagaacggccaatattaaaagtattggctactcagacctgttctgtctctcaaaagatgacctcatggaagctctaactgagtacccagatgccaaaactatgctggaagagaaagggaagcagattttaatgaaagatggtctactggatctaaacattgcaaatgctggcagtgatcctaaagatcttgaagagaaggttactcgaatggaggggtcagtagacctcctgcaaaccaggtttgcccgaatcttggctgagtatgagtccatgcagcagaaactgaaacaaagattaaccaaggttgagaaatttctgaaaccgcttattgacacagaattttcaagtattgagggacctggagcggaaagtgggcccatcgactctacatagaaccgaaaagctggtcattaacagggacatgcctcatgatccttttgatcctatgactgacatcaactaaaatttaaaagaagaggaagactcagttgggaaatttttccatgaggaaaatgtgctttggtgcaaggtacaaggcccacaccctctctgagagatactatgattaaaaaagctttatatcttgggatttttcacaactgataatgtgcaaagatataaactgattaacttgtcagtgtctgtattttctgattttttcacatacgctcattttatgtaatattcttcataaaaatgaataagtagccctcactttcatgccatttccattgttgagtgaagcgtatttgaagtaactgagaattaccatgtacatcatatttgggataacatttttaaaaattagactgcaataaagtaaaattaattatgcaaaaaaaaa

SEQ ID NO: 616 - protein, 690 aa, Homo sapiens
MKLSMKNNIINTQQSFVTMPNVIVPDIEKEIRRMENGACSSFSEDDDSASTSEESENENPHARGSFSYKSLRKGGPSQREQYLPGAIALFNVNNSSNKDQEPEEKKKKKKEKKSKSDDKNENKNDPEKKKKKKDKEKKKKEEKSKDKKEEEKKEVVVIDPSGNTYYNWLFCITLPVMYNWTMVIARACFDELQSDYLEYWLILDYVSDIVYLIDMFVRTRTGYLEQGLLVKEELKLINKYKSNLQFKLDVLSLIPTDLLYFKLGWNYPEIRLNRLLRFSRMFEFFQRTETRTNYPNIFRISNLVMYIVIIIHWNACVFYSISKAIGFGNDTWVYPDINDPEFGRLARKYVYSLYWSTLTLTTIGETPPPVRDSEYVFVVVDFLIGVLIFATIVGNIGSMISNMNAARAEFQARIDAIKQYMHFRNVSKDMEKRVIKWFDYLWTNKKTVDEKEVLKYLPDKLRAEIAINVHLDTLKKVRIFADCEAGLLVELVLKLQPQVYSPGDYICKKGDIGREMYIIKEGKLAVVADDGVTQFVVLSDGSYFGEISILNIKGSKAGNRRTANIKSIGYSDLFCLSKDDLMEALTEYPDAKTMLEEKGKQILMKDGLLDLNIANAGSDPKDLEEKVTRMEGSVDLLQTRFARILAEYESMQQKLKQRLTKVEKFLKPLIDTEFSSIEGPGAESGPIDST

SEQ ID NO: 617 - DNA, 2833 bp, Homo sapiens
ttagcacagtgactacaggaatcacagcccagacacaaaagcaggaaaccctttgaccgggctccttcctattgcaccaacagccttgtgttgctgcaatgaaaacacttccccaagcagctgtggccaagagacgcagaaactgccttgtccacgggccccgcctcagactccaacactcacaagagagcagaggagccccaagtcttggggaccacagaagatgccatgtgctccacgatgtcggcccccacctgcctggcccacttgcctccctgcttcctgctgctggcactggtccttgtcccctcagatgcctctgggcagagcagcaggaatgactggcaggtgctacagcccgagggccccatgctggtggcagaaggtgagacacttctactgaggtgtatggtggtcggctcctgcactgatggtatgataaaatgggtgaaggtgagcactcaggaccaacaggaaatttataactttaaacgtggctccttccctggggtaatgcccatgatccaacggacatcagaaccactgaattgtgattattccatctatatccacaatgtcaccagggagcacactggaacctaccactgtgtgaggtttgatggtttgagtgaacactcagaaatgaaatcggatgaaggcacctcagtgcttgtgaagggagctggggaccctgaaccagacctgtggatcatccagccccaggaattggtgttggggaccactggagacactgtctttctgaactgcacagtgcttggagacggtccccctggacccatcaggtggttccagggagctggtctgagccgggaggccatttacaactttggaggcatctcccaccccaaggagacagcggtgcaggcctccaacaatgacttcagcattcttctgcaaaacgtctccagtgaggatgcaggcacctattactgtgtaaagtttcagaggaaacccaacaggcaatacctgtctggacagggcaccagcctgaaagtgaaagcaaaatctacctcttccaaagaggcagaattcaccagtgaacctgcaactgagatgtctccaacaggcctcctggttgtgttcgcacctgtggtcctggggctgaaggcaattaccttggctgcactcctactggccctggctacctctcggaggagccctgggcaagaagatgtcaagaccacaggcccagcaggagccatgaacaccttagcatggagcaagggtcaagagtgaggggtcagccccagagtgaggaccctctgagttggagaggagccagggctcctcaaccatttccctacctccagtcccagcctctaggtgcccccaggcctcatgacaaactcctagatccctacatctggttttggtccacctagtgaaattcccttctttgcaccgggcttccctctaaaatgtctccctttctctttttggcctgttcaagacctccttgcttttcagtccctggctcagtctctcctcaacacccttgcccctgctgcagccctttctggtgcgccctgcccctttccccacctcgctacatccttcttggcctccaacatccaactcagagtcttcttcccaggagatgtctgtaagaatctctgaactcaaccagccagaccatctgtgcccctccatctacacctttctccccactccttcctgccttccttccatccccctcatggctggcttgggcaggtataatattagaatgcaggttcagcaactataacaaagctcttaaataacagtggcttaaaccagtggaaatcaaccagaaagttgaccatcagcaggccaagcaatacagagactccctggtattgagacccaggattcactgatctcattgctaccaggtccaccttctaggcagccagactggaaaagagggcaggaaaggggagcaggaccctcccctttaagtgcacagtcaggaacttggccacctcacttatctctacttggctggaatgtggtcacatggtcacacctagctgcaagaaacactgggagatgtagtctttatttctggcagcaatgcgcccagctgcaagttttcactagagaaaccagatggcagatatcaggggataaccagttatctccaccacagcagcatacagacagcctctcacctgccctgtgggacacctgagttcaatgcccagctagctagccagcacttcttcccactatcacctcccctggggcagcatgatgtggggcagtagttcccaagatgagtgattttgcccccactggacttttggcaatgtctagagatgtttttggttggcacaacctgggggggtgctaccaccatctagtggactgagaagccctgacatggggaagagtgtgcatgcccaggagtcagacacacctgcctttaaccctgaggcctctgcctcctccctgtgcaccctcagtgactaatcagagtcccttcccatcacggaacatccaggatactaatgtggacttctctgcattgtgtaagaaccaattcaagaccaggcacggtggcttatgcatgtaatcccagcactttgggaggccgaggtgggtggatcacctgagttcaggagtttgagaccagcctggctaacatggtgaaacctcgtctctactaaaaatacaaaaaattagccaggcgtggtggtgtgcacctgtaatcccagctacttgggaggatggggcaggagaaccgcttgaactgggaggcagaggctgcagtgagctgagatcgcgccattgcactccagcctgggcaacaagagcaaaactccgtctc

SEQ ID NO: 618 - protein, 342 aa, Homo sapiens
MCSTMSAPTCLAHLPPCFLLLALVLVPSDASGQSSRNDWQVLQPEGPMLVAEGETLLLRCMVVGSCTDGMIKWVKVSTQDQQEIYNFKRGSFPGVMPMIQRTSEPLNCDYSIYIHNVTREHTGTYHCVRFDGLSEHSEMKSDEGTSVLVKGAGDPEPDLWIIQPQELVLGTTGDTVFLNCTVLGDGPPGPIRWFQGAGLSREAIYNFGGISHPKETAVQASNNDFSILLQNVSSEDAGTYYCVKFQRKPNRQYLSGQGTSLKVKAKSTSSKEAEFTSEPATEMSPTGLLVVFAPVVLGLKAITLAALLLALATSRRSPGQEDVKTTGPAGAMNTLAWSKGQE

SEQ ID NO: 619 - DNA, 2539 bp, Homo sapiens
ttagcacagtgactacaggaatcacagcccagacacaaaagcaggaaaccctttgaccgggctccttcctattgcaccaacagccttgtgttgctgcaatgaaaacacttccccaagcagctgtggccaagagacgcagaaactgccttgtccacgggccccgcctcagactccaacactcacaagagagcagaggagccccaagtcttggggaccacagaagatgccatgtgctccacgatgtcggcccccacctgcctggcccacttgcctccctgcttcctgctgctggcactggtccttgtcccctcagatgcctctgggcagagcagcaggaatgactggcaggtgctacagcccgagggccccatgctggtggcagaaggagctggggaccctgaaccagacctgtggatcatccagccccaggaattggtgttggggaccactggagacactgtctttctgaactgcacagtgcttggagacggtccccctggacccatcaggtggttccagggagctggtctgagccgggaggccatttacaactttggaggcatctcccaccccaaggagacagcggtgcaggcctccaacaatgacttcagcattcttctgcaaaacgtctccagtgaggatgcaggcacctattactgtgtaaagtttcagaggaaacccaacaggcaatacctgtctggacagggcaccagcctgaaagtgaaagcaaaatctacctcttccaaagaggcagaattcaccagtgaacctgcaactgagatgtctccaacaggcctcctggttgtgttcgcacctgtggtcctggggctgaaggcaattaccttggctgcactcctactggccctggctacctctcggaggagccctgggcaagaagatgtcaagaccacaggcccagcaggagccatgaacaccttagcatggagcaagggtcaagagtgaggggtcagccccagagtgaggaccctctgagttggagaggagccagggctcctcaaccatttccctacctccagtcccagcctctaggtgcccccaggcctcatgacaaactcctagatccctacatctggttttggtccacctagtgaaattcccttctttgcaccgggcttccctctaaaatgtctccctttctctttttggcctgttcaagacctccttgcttttcagtccctggctcagtctctcctcaacacccttgcccctgctgcagccctttctggtgcgccctgcccctttccccacctcgctacatccttcttggcctccaacatccaactcagagtcttcttcccaggagatgtctgtaagaatctctgaactcaaccagccagaccatctgtgcccctccatctacacctttctccccactccttcctgccttccttccatccccctcatggctggcttgggcaggtataatattagaatgcaggttcagcaactataacaaagctcttaaataacagtggcttaaaccagtggaaatcaaccagaaagttgaccatcagcaggccaagcaatacagagactccctggtattgagacccaggattcactgatctcattgctaccaggtccaccttctaggcagccagactggaaaagagggcaggaaaggggagcaggaccctcccctttaagtgcacagtcaggaacttggccacctcacttatctctacttggctggaatgtggtcacatggtcacacctagctgcaagaaacactgggagatgtagtctttatttctggcagcaatgcgcccagctgcaagttttcactagagaaaccagatggcagatatcaggggataaccagttatctccaccacagcagcatacagacagcctctcacctgccctgtgggacacctgagttcaatgcccagctagctagccagcacttcttcccactatcacctcccctggggcagcatgatgtggggcagtagttcccaagatgagtgattttgcccccactggacttttggcaatgtctagagatgtttttggttggcacaacctgggggggtgctaccaccatctagtggactgagaagccctgacatggggaagagtgtgcatgcccaggagtcagacacacctgcctttaaccctgaggcctctgcctcctccctgtgcaccctcagtgactaatcagagtcccttcccatcacggaacatccaggatactaatgtggacttctctgcattgtgtaagaaccaattcaagaccaggcacggtggcttatgcatgtaatcccagcactttgggaggccgaggtgggtggatcacctgagttcaggagtttgagaccagcctggctaacatggtgaaacctcgtctctactaaaaatacaaaaaattagccaggcgtggtggtgtgcacctgtaatcccagctacttgggaggatggggcaggagaaccgcttgaactgggaggcagaggctgcagtgagctgagatcgcgccattgcactccagcctgggcaacaagagcaaaactccgtctc

SEQ ID NO: 620 - protein, 244 aa, Homo sapiens
MCSTMSAPTCLAHLPPCFLLLALVLVPSDASGQSSRNDWQVLQPEGPMLVAEGAGDPEPDLWIIQPQELVLGTTGDTVFLNCTVLGDGPPGPIRWFQGAGLSREAIYNFGGISHPKETAVQASNNDFSILLQNVSSEDAGTYYCVKFQRKPNRQYLSGQGTSLKVKAKSTSSKEAEFTSEPATEMSPTGLLVVFAPVVLGLKAITLAALLLALATSRRSPGQEDVKTTGPAGAMNTLAWSKGQE

SEQ ID NO: 621 - DNA, 5538 bp, Homo sapiens
gccgcctccccggaccgaggcaggacctcaccccgcgcgtgttccccgggcgcccctctgcgaaccccaggcccttcccaggtttgcgcgcgggggccatccagaccctgcggagagcgaggcccggagcgtcgccgaggtttgagggcgccggagaccgagggcctggcggccgaaggaaccgccccaagaagagcctctggcccgggggctgctggaacatgtgcggggggacacagtttgtttgacagttgccagactatgtttacgcttctggttctactcagccaactgcccacagttaccctggggtttcctcattgcgcaagaggtccaaaggcttctaagcatgcgggagaagaagtgtttacatcaaaagaagaagcaaactttttcatacatagacgccttctgtataatagatttgatctggagctcttcactcccggcaacctagaaagagagtgcaatgaagaactttgcaattatgaggaagccagagagatttttgtggatgaagataaaacgattgcattttggcaggaatattcagctaaaggaccaaccacaaaatcagatggcaacagagagaaaatagatgttatgggccttctgactggattaattgctgctggagtatttttggttatttttggattacttggctactatctttgtatcactaagtgtaataggctacaacatccatgctcttcagccgtctatgaaagggggaggcacactccctccatcattttcagaagacctgaggaggctgccttgtctccattgccgccttctgtggaggatgcaggattaccttcttatgaacaggcagtggcgctgaccagaaaacacagtgtttcaccaccaccaccatatcctgggcacacaaaaggatttagggtatttaaaaaatctatgtctctcccatctcactgactaccttgtcattttggtataagaaatttgtgttatttgataggccgggcatggtggctcatgcctgtaatcccagcactttgggaggccaggagttcgagaccagcctggccaacatggtgaaacccggtctctactaaaaattcaaaaattacctaggcgtcatggggcatgcctgtagtcccacctacttgggaggctgaagcaggagaattgctcgaacctgggaggcagaggttgcagtaagctgagatcacgccactgcattccagcctgggcgacagagcaagactccatctcaaaaataaaataaaaaaagaaagaaagaaaagaagaagaaaagagaagaaggagaaggagatgaaggaggaggaggaggagaaggagaagaagaagaagaagaagaccacaaaagacatgactatccaactttttatgacaaactgcaaggaataaaggaagaataagtccatgtactgtaccacagaagttctgtctgcatcttggacctgaacttgatcattatcagcttgataagagactttttgactctatatccttgcagttaagaagaaagcacttttttgtaatgtttgttttaatggttcaaaaaaaatctttcttataaagagcataggtagaattagtgaactctttggatcctttgtacagataaaggttatagatttcttgtgttgaatattaaaaaagcaaggatgtctaaccattaagattatccaaagtcaggctgggcgcagtggctcacgcctgtaatcccagcactttgggagggataggtgggcggatcacctgaggtcaggagtttgagaccagcctggccaacatggcaaaaccccgtctctacaaaaatacaaaagaaattagccagacatgatggcgggtgcctctaatcccagctactggggaggctgaggtgggagaatcgcttgaactcgggaggtggaggttgtagtgaggcgagattgtgccattgcactccaacctgggcgacagagtgagactccatctcaaaaaaaaaaaaaaaaaaaaagattatccaaaaagatattggacctactctttcttaggatttttttggcggggggttagaaatacttcacagaatttgacatttcagtataaatctgtgaccttaatataatcacttggttttatatgttaaattattgcacagcagtcatcatattttgcagagtttagttcttaactcttgctgtcagtcatgttttattataggtagtggggtcagtagttttcttcttctaaaaaatactatttgctatgaagttagttcttcagaagatacaagtttgcaatgaaaaggatttgcaagggttgttatgctatcaaataaacagacctaaaatctaggagacactagaacttaatgaagttgcccctgttactgattagtaaatactcccatcttcgttgcaaaattatctctctgtataactacatatgattattttgaaatttgttaaacttcataagtaatagtttgagaatgtggaaaaagtaatttgcttttctgctcttaaaataatattgattaatgttaccagaaaccttttgcatctcttaatatgtctgaacacaaaaggaaaacaccataatcatataaacccattctttgtctcttcttctaaatcatatgtataaccagtttttccttaagaatgtagcagcatataagctataaatttctggagtatatgcacacaaatttatctgggtgggtatgtaggtatatgtgagtttgtttcctcttccaggagctcaagaaataacatactcctgaaaaatagaatagaaatttctgtgctttatgtttttgccaggctattacattttcttatcatttaggatcacttataaaatgatcattgtttattttgttttataatttttacaggagtgagactgcaaacccacatgtttgatagttcctaccaaattaaaagtttagaaagcataaatcatattacagtgcatatgtgagtgtatgtctctcttttaagatgcatcatcttaaggcagataaaagtaagtccttaatcattacagactgccaaagactttatccttttagattctcagtctctttgttgcttgttgcaaataaatcatctagcaacatttacatttaattaggaaatctaacttgcttttaaaagttacccacgttgcatataaaaatcttgctattccttgtgtcttggctttacataagcacttttgctcatgtgactttgcactttgcacttattttaatcctctttaaagggctacaggcaaattctactttgccataatcacactaaggcatggaagaacaacttgcccagaatctagcaggttggtgacaactgggtttagaatgagtgagcacacttttctagtcccatgtcatgcctataaaattacactgcctcgaattatgaaattcagggatcttgtacataattctaagtttgggacagaaatttacaagcatttctcatatatacatacatttatatatgtacatgttacatatatttagatgtattctcatatacatatgaaaatatttatgatgaatagaattataagatatgtatgtatcttgcactgaatcataatttgaaatatttcatgaattcatttacttctattgactcccaaaattctaactgcaagctagcttcagaacctgtgagaaccccaccccacccaagcagctgcctagatttgtctactgctatcattttgtgtaaagcagttgctctaacttgaatgagtctagaattcatcattaagattgtgatatttatagagcatccaatgtggagatcatgatactttaaatataaaaaggaaaatatgatagaactgttattgacaaatgcttataatgattgaagggaaagtatctcaacattgtatcagtcacatatatttctgttgctttcaccattttctattcctgttgtaagtttggtggtagatttagttttgtttggtttatctgttttgtttgtgttttgtctcctggcaattgattagtgttaatcattaaatctattttgacacaaggttttatatataattagatcagttttccactttattacaattaagaaatgagtaaaatatggatataaaaggagaattggattgaaaagacaaatacacatttacaaggtcatacctttggtaggacagacaattccatatagaatattctcttttgataatgaaaaaaattaaagagagcacaaactttgactatgtcaaagtatttttatttttaattttttgagacaaggtcttgctctgctacccaggctggagtgcagtggtgcaatcacaactcactgtagcctgaacttcggggctcaagcaatcctcccacctcagcctcctaagtagctgggaccacaggtgcacctcggtacacctggctaatttttgtgttttttgtagagacagggtttcaccatgttgcccatgctggtctctaactcctgagctcaaggaatccacccacctcggcctcccaaagtgctgggattacaggcatgagccaccacactggactgctgtgtcaaagttttgcatcttttttttttttttttccagaaggagtctcactttgtcacccaggctggagtgcagtggagtgatcatggctcactgcaacctccgcctcccaggttcaaggatttctcctgcctcagcctcctgagtagctgcattacaggcacctgccagcacgccttgcaaatttttgtatttttagtggagatggggttttgccatgttggccaggctggtctcaaactcctgacctcaggtgatccgcccgcctcagcctcccaaagggctgggattacaggcgtgagccactgtgcctggccccaagttttgcatcttttaatgccctctgaacaaatacatagagaaaactctcagaacaattaaaacctgcagagcaacagtgtcctccatgtcttaggtttcaagtttgcctctaaaattctaatccatatttttctacttctcagataatttatgtgtgtgtactcttcctagacgtacaagagactttttaatgctaaatatttgtcagtgcttaacaaaaactcaatttcacattactcatattgtttttgttttaattgaatgtgaattaaatttttattagttatttgatttggaatgttatgtatgccattaacactattaggggaatctctagcatttctgtatttttaaagaatttgattcttttgtagattctgcctgtgtggtcattttaaaacatgtgtgacatatatcagtaccttcattcttctatattttgtgtctcctccaacctccaactttttttgttttttgaaaaatgtttctctaacacctcaacagtttaaggtaatttagtacacatatatcagtatttttgtgatctgaaaaagcaacccattttctaaattcatatttttcctaaaactttactatgtttttattttaagaggtttcctgttatatacactttttacacatgcaaataaactttataccaagtgagta

SEQ ID NO: 622 - protein, 226 aa, Homo sapiens
MFTLLVLLSQLPTVTLGFPHCARGPKASKHAGEEVFTSKEEANFFIHRRLLYNRFDLELFTPGNLERECNEELCNYEEAREIFVDEDKTIAFWQEYSAKGPTTKSDGNREKIDVMGLLTGLIAAGVFLVIFGLLGYYLCITKCNRLQHPCSSAVYERGRHTPSIIFRRPEEAALSPLPPSVEDAGLPSYEQAVALTRKHSVSPPPPYPGHTKGFRVFKKSMSLPSH

SEQ ID NO: 623 - DNA, 6428 bp, Homo sapiens
aggcggcggcgctctcccgcgtcacagcgccgggcggcggcggggagatgcggctgctggcactggcggcggccgcgctgctggcgcgggctccggctccggaggtctgtgcggccctcaatgtcactgtgtccccggggcccgtggttgactacctggagggggagaatgccactctcctctgccacgtctcccagaaaaggcggaaggacagcttgctggccgtgcgctggttctttgcacactccttcgactcccaggaggccttgatggtgaagatgaccaagctccgggtggtgcagtactatgggaatttcagccgcagcgccaaacggcggaggctgcgcctgctggaggagcagcggggggcgctctacaggctctccgtcttgacactgcagccctccgatcaagggcattacgtctgcagagtccaggaaatcagcaggcacaggaacaagtggacggcctggtccaatggctcctcagccacggaaatgagagtcatttccctcaaagcttctgaagagtcatcctttgagaaaacaaaagagacttgggcattttttgaagatctctatgtgtatgctgtcctcgtgtgctgcgtggggatcctcagcattctgctcttcatgctggtcatcgtctggcagtctgtgtttaacaagcggaaatccagagtgagacattatttggtgaaatgccctcagaacagctcaggggagactgtcactagcgtgaccagcttggccccactacagcccaagaagggcaagaggcagaaggagaagcctgacattcctcccgcagtccctgccaaagctccgatagcccccacgttccataaaccgaagctgctgaaaccacagagaaaagtcacgctgccaaagattgctgaggaaaacttaacctatgccgaactggagctgatcaaaccccaccgggctgccaaaggcgcccccaccagcactgtctacgcccagatcctcttcgaggagaacaagctgtagtacagcgtccacctccaaggttctatttaatacctgccacccagtgatttatgaagccttggagacaaagcccttatgtctgtattttcactcatgccttctgagtggtggggagccccttttcagcagcattctgggtgcctttgaagaggtacaagcctgctctccccaaaagaatcggggccacagctcttgacagatctcccgggacaagatgcgcctgggtttgagccctgagcgtaaggattctgatcctgagagcagccaaggagattttctgctgagccaaaccccttcacatttttctcctctttccccaggttttctttaaaatcgtttttaaatcttaattttactctctactcttcctgtatccacgatacaagctcacagtatatagctagaggaaatgccattatggacccaactgtaagatggcacatatgttggttttccaaggatcagatggcattgccagggccacagccaactgctgattgccagcaccacctgagatggcatctcttgttttaaatagatgcactaaccctgaagattaaggccagaggggcagactgactagagaagtataaggtctgtctctgaatgccatggtgcccacctatgagaccctgaggccgcaggacaagaagaacaccattctagagggcttccagccctttcacaaggtggacctgtactgatagagaaacacactctctaagaagtgcttactcacccttttccaaaggagcacaggtgttggccatcagaagacacactggagcgcatgggcctcttcactgtgtgccaagctcagtcacctctgattcagcccctgaaggtgtctgctgccaggtgccctcagggtaggagagtgggaagtacacgccaagctggaaagtgtgttctgaagaccctcctcttgccaagtgccttgcccattgcaaccttgtgtgtgaattctaatgggtttgaatgggggtcagggtgcatggggaagttgctctgtggacctttgggacacaggaatcttggacttactggcaggggatccattctgaaagcaccatcctgtcaactgtgttattgaggacatttcttgatgtgagtatagtctgggtggctatttactgcccactatagaaattgtttgactatgtagtggaccatgtatatatgataaattatctattttaaacacagctggggtatgagttgtgccctctatatagctgtgtgaacttggctaaatttcttatcccctaatgacctcagactccatgtttgtgtaaagacgacttaacttcccatagaattcttgagggtaaaatgggataatgaatcttgccagttctagaaactgtaaattgctacacaaatgctctgtgttgacattcatgctaaagccagtctgcattttcaaaatgaaaatttcttcactatttaaggctttcattgcaataactttaaaaaccaaatatttgtccaccaacttagccctacagtaatgttcccaaagactcatgagagtttatggtttattggaaagggtccaaattggaagcagatattgattttctgggagcaaactggtctgcctttacaaagtggaagttcaccctctctggataacacctgtgtctcattcctccctctctgccagatctcgaaggcactgaataaaccatgcagcttttgaggaagaaagaaccatttggaagaactcactagaacttctttgagcatctctttgggaggggaggatatatggttagcacaccatttatataataattatcacagggatttttaattttatcatggcagtgttctgacagatgtatagtgttttgagggcagaggatgatctcctaatttgcccaaagagccttatgggtttgtggggctctgggggtgccaaatgggaaggagagggggcacatgaaaaggaaatggcgggaagagggcaacaggccagggggtaatatcttcccaggccccttaggcctctacagaacggaaatgaacttcattcacccccaaacccacccacttaaatccaaagagagcttagggttattatgcatggacaggaacacattctaccaagaacacatgctcttaagagctagtagctcccagttagagtcaaaccagtcattgttatattatagattgaatccagcctctttctcccaaactgtggtcatcactgcatgaatccacactaaggtgtgtgaatgggaacctgcagattatctcctcctactgaaaatgctgcccaggggaatcttggaagctatggacagcatccaggcagagctggtcccactgttatctccagaagcaaatgcccaagctgtgctcagaactggaagcaatggatgacttgtatcaggtgcttgtttgagaggatatattgacattattgccatagtaagcttaaaaaaatgtgcccactcattcattctttgtccatggaccactaatcatgcattgtcatttccaaagataaggggaaacatatcacatatcattgaaatagaaattagggaaagtttgtcaatttgttttcactataaggcatcaatggcagaaactacatatgagtaattttcaaaatagaccattgcttaaatgtttaaatgaagctaaaagaagtatgaacccattggttagagtgcagtggcttctttcaggcagacagcagatgctctcagatttggtggtgagttttggccttggcatggttggcatggagtcagcacaggaagccgggaggtatgaaggggcatccacctgggtgaaactgtcttgccaagccaaagccccgaggcctgccctgaagcagctgtagtggaggagaggcctgggattccttagagtcacctttttacgaatgtaccgccactctgttagctcacagggaaaataaggaaaagccaggcctcccacctcttgactcttgtgagagtgaagacaacatggggcatttagaaaatatatttttagtgtatgataatgtgggctggcccacacagcaatgagcccaaagaccccctcgctttgggaattattcatggccctgctcatcacagcctctgatatgcatgactgtaacctaggctgagccaagaatggagctcatgccagaaatggtcctaagcatgcacatggccccctggaatatcaaaatcctggggagaaagaaatcatctttgccttgggcagtgaagctggaatggcacatatctatctgttgccacatctcctgcctagtggagaagccttggaaggcaacagacactgagcaagcagcagggaggagaatgtcctggaagggcaggactctacccaagtccctaacatccccagactcttctcttccataaactctctaattactctgctgtttaaatcctggttttggtcaagccagtcaggttgcataaagaatatgaatacagtatgcatcaaagttgcttcccagaacaggaagcaaaacaaacaaacaaacaaacaaacaaaatactgatatcagtacccagggtgcccaattaggtcacacccagtggctgcattgcagcccctgagctcctgctgcaccgtgtgtcctgctgcccgagtgggccccaccctgggttctgaagatgcccttcttaatggagagctcccgatggagggctccaggactgatgctctccctaaggaagggaggcctcagatttggagagggacaccaacaggaccagaggaggactgaggggcactggcaccaataagtggaagggaacagcgtggtaacaaaaaagagccatgccacttgcatgctggagggagtctttttgtgtcagcctaaagcttaggctggtgtccatgtggaacatgacatctttccagtatccctgatccaggaaactgcagtgagacccaggtgacccagctctgtgtcatttggagcccattaaaaagtgaggcagccacatggcggggacattgaccccactccagaccacactcccatctccatacataggatagaaactgttcatcaggaaggaaaaccaaacagaaattcgtggtctaggggaggggtctgcattcagcatggccatgctgggctggagtggctgtggggtgtccagatagatgggcatgtagactagtgctttctcaacctttaatgcatgcacaaatcatcgagatcttgttaaaatgtagatcctgggtgggcacggtggctcacgcctgtaatcccagcactttgggaggctgaggcgggcggatcatgaggtcaggagatcgagaccatcctggctaacacggtgaaaccctgtctctactaaaaatacaaaaaattagccaggcatggtggtgggtgcctgtagtcccagctactcgggaggctgaggcaggagaatggcatgaacccgggaggcggagcttgcagtgagccgagatcgtgctgctgcactccagcctgggcaatagagtgagattccgtctcaaaaaaaaaaaaaaaaaaaatgtagatcctggctcaggaggtctgggataggacctgggattctgagtttctaacaagctcccagggatgtccatgcttctggtccctgaaccacactttgagtgacaaggatgtaaactgttggaaacatggatctggtgctcattgcgggaaagggggtgtcctcagggcataggtcacagccaaagccctgacagcgggcaagagtcccagggagaggctgcctgcacattgaggaggggaagggctgggcctgagcagtggggagcatccatgctggcaggtatgcagcaggcaaggagatccaggtggagatcagaggacagtgacagtcacagcagcaggggagagccaggagaaagctgctcctaggggtgtctcaaaggaagaagggatctgcagtgtgaactctgcagagggcagggagaatagaggttaagcctttgctcattctgaattaattgattactgctttttaaaagtgctttctttctctgggaaaaaaaaaacattccccagtgcctaaggctaacagacgtgggcgctgagctgtgtctggtctgctgagtgtattttccccagagcaatcctcatcttctcagggggtggggatttggacaagactcttcctgaacacgcagcgtggtggggaagggtggccatggaggttttctgttccttctgttgtcactggtgaaagacgacttggtgcccaatttctaataaacacaatgctattagcgtcactccaatttagtgtctgattgttaaatgttaatgtactgcactctacagttttaaatataattagagatgtttacagctttggttaaatgcaccttgttcttccacattaaactttattacaagcgtcaaaaaaaaaaaaa

SEQ ID NO: 624 - protein, 320 aa, Homo sapiens
MRLLALAAAALLARAPAPEVCAALNVTVSPGPVVDYLEGENATLLCHVSQKRRKDSLLAVRWFFAHSFDSQEALMVKMTKLRVVQYYGNFSRSAKRRRLRLLEEQRGALYRLSVLTLQPSDQGHYVCRVQEISRHRNKWTAWSNGSSATEMRVISLKASEESSFEKTKETWAFFEDLYVYAVLVCCVGILSILLFMLVIVWQSVFNKRKSRVRHYLVKCPQNSSGETVTSVTSLAPLQPKKGKRQKEKPDIPPAVPAKAPIAPTFHKPKLLKPQRKVTLPKIAEENLTYAELELIKPHRAAKGAPTSTVYAQILFEENKL

SEQ ID NO: 625 - DNA, 2193 bp, Homo sapiens
aggcggcggcgctctcccgcgtcacagcgccgggcggcggcggggagatgcggctgctggcactggcggcggccgcgctgctggcgcgggctccggctccggaggtctgtgcggccctcaatgtcactgtgtccccggggcccgtggttgactacctggagggggagaatgccactctcctctgccacgtctcccagaaaaggcggaaggacagcttgctggccgtgcgctggttctttgcacactccttcgactcccaggaggccttgatggtgaagatgaccaagctccgggtggtgcagtactatgggaatttcagccgcagcgccaaacggcggaggctgcgcctgctggaggagcagcggggggcgctctacaggctctccgtcttgacactgcagccctccgatcaagggcattacgtctgcagagtccaggaaatcagcaggcacaggaacaagtggacggcctggtccaatggctcctcagccacggaaatgagaggagtctccagccatccagtggagaggggagcttttcttgggatttcccttgtaatactacctcactctttgcccttcaccgcagacttaaccatggcctccttcctgcagagttcttgatgtgagataaaattgcttgtctttcactggaaactcccagaaagaaaggctggtgcctggtctctcctcatttccctgtcatgaacacctcgcccagcacatggagggtgacttgcgatgatatatttaaaaaataactcccagttctgagaagagccataggagtgttggctcttattatctgtcctgatttccatatgttggttgttttctattgcaaaagtaatatagtgtaatatagttcaattatagaaaacatggaaaaatactgaaagggtttaaagaagaaaataaaaatgacttaccatatctctactcaacttaacatttcagtgcaaatccttcctgtcattttatgcaaattaaaatttaaaacctaatttcaatcttactgtaaagagtgttctgtgactcgcttttctgatattactaaatagtgtgcacattttcccttgttaaatatgcctcaaaaacataatgttaatgatggaataatgttccatcatgcaggtggacctcaatttagcttcctgcttattgttactggacatttgaagctgctgtaaatctttgtcaataaatctccatgaatatccctgaccttagcataaaatcctggaaataagattgccgggtccaaagatctacccaaattaaaaatggacacaatttcaagaagtgaattgacctctaaaatagtttacaaatttatattaccaccagcattgaaaatgccttttccccacggattggtctacataagagtgttggttaattttatgtgttgacttgactaggctaaacgatgcccagatagcaggtaaaacattatttctgggtgtgttcgttctgtttctctgggatcccagactaacacaatcatatactttttgaggatgatgatgataacaatgaatgcctgcaacagtgcctggtacacagttgatcctcaatagatacttgatgaatgaataaaatgttctttgtcaagtgtcattagcaactgttgctgtggatgactttgaagtaggcgtgacttggtggatgtagtcaccctctctgggatgccttacctctctttcccttgacctatttcaatcatacatattttttggggctccacatccagctttcatcttccatcaatgccttctttgggcatgccagcccatggagtgctctcccactggcaacatcttgtagcttctgtttttagcactgtagacacaacattatgtggtcatgccgttgtttttcaagctgctgtggcacagtgatgatgtcaaaaatattatacataaaagagttggccaggcatggtggcttacgcctgtaatcccagcactttgggaggccgaggtgggtggatcacgaagtcaagagttcaagaccagcctggccaacatggtgaaaccccatctctacaaaaatacaaaaattagccaggtgtggtggtgtgcacctgtaatcccagctactcgggaggctgagatgaagaattgcttaaacccaggaggcaaaggctgcagtgagccaagatcccgccactgcactccagcactccgctctc

SEQ ID NO: 626 - protein, 191 aa, Homo sapiens
MRLLALAAAALLARAPAPEVCAALNVTVSPGPVVDYLEGENATLLCHVSQKRRKDSLLAVRWFFAHSFDSQEALMVKMTKLRVVQYYGNFSRSAKRRRLRLLEEQRGALYRLSVLTLQPSDQGHYVCRVQEISRHRNKWTAWSNGSSATEMRGVSSHPVERGAFLGISLVILPHSLPFTADLTMASFLQSS

SEQ ID NO: 627 - DNA, 2309 bp, Homo sapiens
tgggcggtgcctgagcgggcgggaaggaggcgttcgtctagatttgtcggcttgcggggagacttcaggagtcgctgtctctgaacttccagcctcagagaccgccgcccttgtccccgagggccatgggccgggtctcagggcttgtgccctctcgcttcctgacgctcctggcgcatctggtggtcgtcatcaccttattctggtcccgggacagcaacatacaggcctgcctgcctctcacgttcacccccgaggagtatgacaagcaggacattcatccacttcctctctgcaggctggtggccgcgctctctgtcaccctgggcctctttgcagtggagctggccggtttcctctcaggagtctccatgttcaacagcacccagagcctcatctccattggggctcactgtagtgcatccgtggccctgtccttcttcatattcgagcgttgggagtgcactacgtattggtacatttttgtcttctgcagtgcccttccagctgtcactgaaatggctttattcgtcaccgtctttgggctgaaaaagaaacccttctgattaccttcatgacgggaacctaaggacgaagcctacaggggcaagggccgcttcgtattcctggaagaaggaaggcataggcttcggttttcccctcggaaactgcttctgctggaggatatgtgttggaataattacgtcttgagtctgggattatccgcattgtatttagtgctttgtaataaaatatgttttgtagtaacattaagacttatatacagttttaggggacaattgagatggctgaactactgaataaaaaaaaaacaacgctgttttctagtcctgcagaccgtaagatacttggtatcgcttctattttggttactacggtaggtgcctggcggaagggagtgggcggagatatgtaaatagaaagtgcgtacagttagaacgtccggcacgtaactgatcggagcattctgggaagaagtaatttattccttttcggcagccgaatgaaaaaaaaatttaaaaaaatgtgcgagctaatatggcaaaacaactggaaggacgctaaataataggattgctcataccagcgcgttatgaactcaccctagcttgtaacggaatctttttcactgagtgcagaatgtcggctgtttgtctgtatcgtcaggtgggataatccttacctgttcctcctccggagggcagattagaacatgatgattggagatgcatgaaacgtgattaacgtctctgcgtaatcaggacttgcaacaccctgattgctcctgtctgattctttctgacgatcacttacatttgtgttatgctgattagcagatatccacaaacatagctatgaagttctgactgggataaccttgctgtttgtctattttgcagtcttgctattgctgtttgtctattttgcagtcttgctaaatttgtttgttcttgaaaattgtgatttggtttttgttgctttctggaatttaggcagtgaaataatacaaatgggctctttgttttttgtcgtttgataactttaatcctcacttctcaggaaacattgcacatcagtaaatatctgcagtcttgtgcacatggtggttgccctcaggatggtattcaataggaactgtatttctttttccttgaggtagggtcttggtctgtcgccaaggcaggagtgcacggcgcagatgtatatacatggatacatttgtttttggagagttggttgttaaaaatctaccagtacacccccaagaaactcatcatcaccaatgacttcttcccaaatccagagtcacttttcagacttgagattgacctctcttcagcatatggtatgttgaccacccccctcttttggttttttttttttttttttttgagacagtctcactctgttgcccaggctagagtgcagtgtgcagtggtgggatcatggctcactgcagcctcaaactcccaggctcagatgatcctcctgcatcagcctcccaagtagctgggactacaggtgagcaccaccacacctggttgttttaaaatttttctatagagacagggtctcactgtgttgcccaagctggtcccaaactcctgggctcaagccgtcctccccactaggcctctaggcctcctaaagtgctaggatacaggcatgagccaccgcgtttctcccactcccctcttttgcacttttttctcccttagttttgaaacagtggttcacctggtttgcctactattatactgttctggttgttccttcttacattaatt

SEQ ID NO: 628 - protein, 146 aa, Homo sapiens
MGRVSGLVPSRFLTLLAHLVVVITLFWSRDSNIQACLPLTFTPEEYDKQDIHPLPLCRLVAALSVTLGLFAVELAGFLSGVSMFNSTQSLISIGAHCSASVALSFFIFERWECTTYWYIFVFCSALPAVTEMALFVTVFGLKKKPF

SEQ ID NO: 629 - DNA, 2291 bp, Homo sapiens
tgggcggtgcctgagcgggcgggaaggaggcgttcgtctagatttgtcggcttgcggggagacttcaggagtcgctgtctctgaacttccagcctcagagaccgccgcccttgtccccgagggccatgggccgggtctcagggcttgtgccctctcgcttcctgacgctcctggcgcatctggtggtcgtcatcaccttattctggtcccgggacagcaacatacaggcctgcctgcctctcacgttcacccccgaggagtatgacaagcaggacattcagctggtggccgcgctctctgtcaccctgggcctctttgcagtggagctggccggtttcctctcaggagtctccatgttcaacagcacccagagcctcatctccattggggctcactgtagtgcatccgtggccctgtccttcttcatattcgagcgttgggagtgcactacgtattggtacatttttgtcttctgcagtgcccttccagctgtcactgaaatggctttattcgtcaccgtctttgggctgaaaaagaaacccttctgattaccttcatgacgggaacctaaggacgaagcctacaggggcaagggccgcttcgtattcctggaagaaggaaggcataggcttcggttttcccctcggaaactgcttctgctggaggatatgtgttggaataattacgtcttgagtctgggattatccgcattgtatttagtgctttgtaataaaatatgttttgtagtaacattaagacttatatacagttttaggggacaattgagatggctgaactactgaataaaaaaaaaacaacgctgttttctagtcctgcagaccgtaagatacttggtatcgcttctattttggttactacggtaggtgcctggcggaagggagtgggcggagatatgtaaatagaaagtgcgtacagttagaacgtccggcacgtaactgatcggagcattctgggaagaagtaatttattccttttcggcagccgaatgaaaaaaaaatttaaaaaaatgtgcgagctaatatggcaaaacaactggaaggacgctaaataataggattgctcataccagcgcgttatgaactcaccctagcttgtaacggaatctttttcactgagtgcagaatgtcggctgtttgtctgtatcgtcaggtgggataatccttacctgttcctcctccggagggcagattagaacatgatgattggagatgcatgaaacgtgattaacgtctctgcgtaatcaggacttgcaacaccctgattgctcctgtctgattctttctgacgatcacttacatttgtgttatgctgattagcagatatccacaaacatagctatgaagttctgactgggataaccttgctgtttgtctattttgcagtcttgctattgctgtttgtctattttgcagtcttgctaaatttgtttgttcttgaaaattgtgatttggtttttgttgctttctggaatttaggcagtgaaataatacaaatgggctctttgttttttgtcgtttgataactttaatcctcacttctcaggaaacattgcacatcagtaaatatctgcagtcttgtgcacatggtggttgccctcaggatggtattcaataggaactgtatttctttttccttgaggtagggtcttggtctgtcgccaaggcaggagtgcacggcgcagatgtatatacatggatacatttgtttttggagagttggttgttaaaaatctaccagtacacccccaagaaactcatcatcaccaatgacttcttcccaaatccagagtcacttttcagacttgagattgacctctcttcagcatatggtatgttgaccacccccctcttttggttttttttttttttttttttgagacagtctcactctgttgcccaggctagagtgcagtgtgcagtggtgggatcatggctcactgcagcctcaaactcccaggctcagatgatcctcctgcatcagcctcccaagtagctgggactacaggtgagcaccaccacacctggttgttttaaaatttttctatagagacagggtctcactgtgttgcccaagctggtcccaaactcctgggctcaagccgtcctccccactaggcctctaggcctcctaaagtgctaggatacaggcatgagccaccgcgtttctcccactcccctcttttgcacttttttctcccttagttttgaaacagtggttcacctggtttgcctactattatactgttctggttgttccttcttacattaatt

SEQ ID NO: 630 - protein, 140 aa, Homo sapiens
MGRVSGLVPSRFLTLLAHLVVVITLFWSRDSNIQACLPLTFTPEEYDKQDIQLVAALSVTLGLFAVELAGFLSGVSMFNSTQSLISIGAHCSASVALSFFIFERWECTTYWYIFVFCSALPAVTEMALFVTVFGLKKKPF

SEQ ID NO: 631 - DNA, 2288 bp, Homo sapiens
tgggcggtgcctgagcgggcgggaaggaggcgttcgtctagatttgtcggcttgcggggagacttcaggagtcgctgtctctgaacttccagcctcagagaccgccgcccttgtccccgagggccatgggccgggtctcagggcttgtgccctctcgcttcctgacgctcctggcgcatctggtggtcgtcatcaccttattctggtcccgggacagcaacatacaggcctgcctgcctctcacgttcacccccgaggagtatgacaagcaggacattcatccacttcctctctgcaggctggtggccgcgctctctgtcaccctgggcctctttgcagtggagctggccggtttcctctcaggagtctccatgttcaacagcacccagagcctcatctccattggggctcactgtagtgcatccgtggccctgtccttcttcatattcgagcgttgggagtgcactacgtattgtgcccttccagctgtcactgaaatggctttattcgtcaccgtctttgggctgaaaaagaaacccttctgattaccttcatgacgggaacctaaggacgaagcctacaggggcaagggccgcttcgtattcctggaagaaggaaggcataggcttcggttttcccctcggaaactgcttctgctggaggatatgtgttggaataattacgtcttgagtctgggattatccgcattgtatttagtgctttgtaataaaatatgttttgtagtaacattaagacttatatacagttttaggggacaattgagatggctgaactactgaataaaaaaaaaacaacgctgttttctagtcctgcagaccgtaagatacttggtatcgcttctattttggttactacggtaggtgcctggcggaagggagtgggcggagatatgtaaatagaaagtgcgtacagttagaacgtccggcacgtaactgatcggagcattctgggaagaagtaatttattccttttcggcagccgaatgaaaaaaaaatttaaaaaaatgtgcgagctaatatggcaaaacaactggaaggacgctaaataataggattgctcataccagcgcgttatgaactcaccctagcttgtaacggaatctttttcactgagtgcagaatgtcggctgtttgtctgtatcgtcaggtgggataatccttacctgttcctcctccggagggcagattagaacatgatgattggagatgcatgaaacgtgattaacgtctctgcgtaatcaggacttgcaacaccctgattgctcctgtctgattctttctgacgatcacttacatttgtgttatgctgattagcagatatccacaaacatagctatgaagttctgactgggataaccttgctgtttgtctattttgcagtcttgctattgctgtttgtctattttgcagtcttgctaaatttgtttgttcttgaaaattgtgatttggtttttgttgctttctggaatttaggcagtgaaataatacaaatgggctctttgttttttgtcgtttgataactttaatcctcacttctcaggaaacattgcacatcagtaaatatctgcagtcttgtgcacatggtggttgccctcaggatggtattcaataggaactgtatttctttttccttgaggtagggtcttggtctgtcgccaaggcaggagtgcacggcgcagatgtatatacatggatacatttgtttttggagagttggttgttaaaaatctaccagtacacccccaagaaactcatcatcaccaatgacttcttcccaaatccagagtcacttttcagacttgagattgacctctcttcagcatatggtatgttgaccacccccctcttttggttttttttttttttttttttgagacagtctcactctgttgcccaggctagagtgcagtgtgcagtggtgggatcatggctcactgcagcctcaaactcccaggctcagatgatcctcctgcatcagcctcccaagtagctgggactacaggtgagcaccaccacacctggttgttttaaaatttttctatagagacagggtctcactgtgttgcccaagctggtcccaaactcctgggctcaagccgtcctccccactaggcctctaggcctcctaaagtgctaggatacaggcatgagccaccgcgtttctcccactcccctcttttgcacttttttctcccttagttttgaaacagtggttcacctggtttgcctactattatactgttctggttgttccttcttacattaatt

SEQ ID NO: 632 - protein, 139 aa, Homo sapiens
MGRVSGLVPSRFLTLLAHLVVVITLFWSRDSNIQACLPLTFTPEEYDKQDIHPLPLCRLVAALSVTLGLFAVELAGFLSGVSMFNSTQSLISIGAHCSASVALSFFIFERWECTTYCALPAVTEMALFVTVFGLKKKPF

SEQ ID NO: 633 - DNA, 2270 bp, Homo sapiens
tgggcggtgcctgagcgggcgggaaggaggcgttcgtctagatttgtcggcttgcggggagacttcaggagtcgctgtctctgaacttccagcctcagagaccgccgcccttgtccccgagggccatgggccgggtctcagggcttgtgccctctcgcttcctgacgctcctggcgcatctggtggtcgtcatcaccttattctggtcccgggacagcaacatacaggcctgcctgcctctcacgttcacccccgaggagtatgacaagcaggacattcagctggtggccgcgctctctgtcaccctgggcctctttgcagtggagctggccggtttcctctcaggagtctccatgttcaacagcacccagagcctcatctccattggggctcactgtagtgcatccgtggccctgtccttcttcatattcgagcgttgggagtgcactacgtattgtgcccttccagctgtcactgaaatggctttattcgtcaccgtctttgggctgaaaaagaaacccttctgattaccttcatgacgggaacctaaggacgaagcctacaggggcaagggccgcttcgtattcctggaagaaggaaggcataggcttcggttttcccctcggaaactgcttctgctggaggatatgtgttggaataattacgtcttgagtctgggattatccgcattgtatttagtgctttgtaataaaatatgttttgtagtaacattaagacttatatacagttttaggggacaattgagatggctgaactactgaataaaaaaaaaacaacgctgttttctagtcctgcagaccgtaagatacttggtatcgcttctattttggttactacggtaggtgcctggcggaagggagtgggcggagatatgtaaatagaaagtgcgtacagttagaacgtccggcacgtaactgatcggagcattctgggaagaagtaatttattccttttcggcagccgaatgaaaaaaaaatttaaaaaaatgtgcgagctaatatggcaaaacaactggaaggacgctaaataataggattgctcataccagcgcgttatgaactcaccctagcttgtaacggaatctttttcactgagtgcagaatgtcggctgtttgtctgtatcgtcaggtgggataatccttacctgttcctcctccggagggcagattagaacatgatgattggagatgcatgaaacgtgattaacgtctctgcgtaatcaggacttgcaacaccctgattgctcctgtctgattctttctgacgatcacttacatttgtgttatgctgattagcagatatccacaaacatagctatgaagttctgactgggataaccttgctgtttgtctattttgcagtcttgctattgctgtttgtctattttgcagtcttgctaaatttgtttgttcttgaaaattgtgatttggtttttgttgctttctggaatttaggcagtgaaataatacaaatgggctctttgttttttgtcgtttgataactttaatcctcacttctcaggaaacattgcacatcagtaaatatctgcagtcttgtgcacatggtggttgccctcaggatggtattcaataggaactgtatttctttttccttgaggtagggtcttggtctgtcgccaaggcaggagtgcacggcgcagatgtatatacatggatacatttgtttttggagagttggttgttaaaaatctaccagtacacccccaagaaactcatcatcaccaatgacttcttcccaaatccagagtcacttttcagacttgagattgacctctcttcagcatatggtatgttgaccacccccctcttttggttttttttttttttttttttgagacagtctcactctgttgcccaggctagagtgcagtgtgcagtggtgggatcatggctcactgcagcctcaaactcccaggctcagatgatcctcctgcatcagcctcccaagtagctgggactacaggtgagcaccaccacacctggttgttttaaaatttttctatagagacagggtctcactgtgttgcccaagctggtcccaaactcctgggctcaagccgtcctccccactaggcctctaggcctcctaaagtgctaggatacaggcatgagccaccgcgtttctcccactcccctcttttgcacttttttctcccttagttttgaaacagtggttcacctggtttgcctactattatactgttctggttgttccttcttacattaatt

SEQ ID NO: 634 - protein, 133 aa, Homo sapiens
MGRVSGLVPSRFLTLLAHLVVVITLFWSRDSNIQACLPLTFTPEEYDKQDIQLVAALSVTLGLFAVELAGFLSGVSMFNSTQSLISIGAHCSASVALSFFIFERWECTTYCALPAVTEMALFVTVFGLKKKPF

SEQ ID NO: 635 - DNA, 2093 bp, Homo sapiens
tgggcggtgcctgagcgggcgggaaggaggcgttcgtctagatttgtcggcttgcggggagacttcaggagtcgctgtctctgaacttccagcctcagagaccgccgcccttgtccccgagggccatgggccgggtctcagggcttgtgccctctcgcttcctgacgctcctggcgcatctggtggtcgtcatcaccttattctggtcccgggacagcaacatacaggcctgcctgcctctcacgttcacccccgaggagtatgacaagcaggacattcatgcccttccagctgtcactgaaatggctttattcgtcaccgtctttgggctgaaaaagaaacccttctgattaccttcatgacgggaacctaaggacgaagcctacaggggcaagggccgcttcgtattcctggaagaaggaaggcataggcttcggttttcccctcggaaactgcttctgctggaggatatgtgttggaataattacgtcttgagtctgggattatccgcattgtatttagtgctttgtaataaaatatgttttgtagtaacattaagacttatatacagttttaggggacaattgagatggctgaactactgaataaaaaaaaaacaacgctgttttctagtcctgcagaccgtaagatacttggtatcgcttctattttggttactacggtaggtgcctggcggaagggagtgggcggagatatgtaaatagaaagtgcgtacagttagaacgtccggcacgtaactgatcggagcattctgggaagaagtaatttattccttttcggcagccgaatgaaaaaaaaatttaaaaaaatgtgcgagctaatatggcaaaacaactggaaggacgctaaataataggattgctcataccagcgcgttatgaactcaccctagcttgtaacggaatctttttcactgagtgcagaatgtcggctgtttgtctgtatcgtcaggtgggataatccttacctgttcctcctccggagggcagattagaacatgatgattggagatgcatgaaacgtgattaacgtctctgcgtaatcaggacttgcaacaccctgattgctcctgtctgattctttctgacgatcacttacatttgtgttatgctgattagcagatatccacaaacatagctatgaagttctgactgggataaccttgctgtttgtctattttgcagtcttgctattgctgtttgtctattttgcagtcttgctaaatttgtttgttcttgaaaattgtgatttggtttttgttgctttctggaatttaggcagtgaaataatacaaatgggctctttgttttttgtcgtttgataactttaatcctcacttctcaggaaacattgcacatcagtaaatatctgcagtcttgtgcacatggtggttgccctcaggatggtattcaataggaactgtatttctttttccttgaggtagggtcttggtctgtcgccaaggcaggagtgcacggcgcagatgtatatacatggatacatttgtttttggagagttggttgttaaaaatctaccagtacacccccaagaaactcatcatcaccaatgacttcttcccaaatccagagtcacttttcagacttgagattgacctctcttcagcatatggtatgttgaccacccccctcttttggttttttttttttttttttttgagacagtctcactctgttgcccaggctagagtgcagtgtgcagtggtgggatcatggctcactgcagcctcaaactcccaggctcagatgatcctcctgcatcagcctcccaagtagctgggactacaggtgagcaccaccacacctggttgttttaaaatttttctatagagacagggtctcactgtgttgcccaagctggtcccaaactcctgggctcaagccgtcctccccactaggcctctaggcctcctaaagtgctaggatacaggcatgagccaccgcgtttctcccactcccctcttttgcacttttttctcccttagttttgaaacagtggttcacctggtttgcctactattatactgttctggttgttccttcttacattaatt

SEQ ID NO: 636 - protein, 74 aa, Homo sapiens
MGRVSGLVPSRFLTLLAHLVVVITLFWSRDSNIQACLPLTFTPEEYDKQDIHALPAVTEMALFVTVFGLKKKPF

SEQ ID NO: 637 - DNA, 3692 bp, Homo sapiens
gcacatgcgcacaggcggcgcagccggcacgcggcgctcgcgctccctccttaaatgagcctgggcgccccgcgcccgccacttcagtggatcccgcgccggggccgcgggcggagctgcctgccggtcccgcgccgcgcgtccgcactcctcggccctcgggcggtcgatgggacggggcgccgcggagcaggaggcggcgcccgtcggggtgctcgggccgcgcgggagcccactgtggggctcgggcatggcgggccgcaggacctgagctctcctcaggggagcggggaggcagctgctggccggcgatggggacggagtggggccgtcgccgccgcgccgagccgtgagcgccgagccaccgccgccgctacctcagcccttcgcgaagcgccgggcagctcgggaacatggccctggagcggctctgctcggtcctcaaagtgttgttaataacagtactggtagtggaagggattgccgtggcccaaaaaacccaagatggacaaaatattggaatcaagcatattcctgcaacccagtgtggcatttgggttcgaaccagcaatggaggtcattttgcttcgccaaattatcctgactcatatccaccaaacaaggagtgtatctacattttggaagctgctccacgtcaaagaatagagttgacctttgatgaacattattatatagaaccatcatttgagtgtcggtttgatcacttggaagttcgagatgggccatttggtttctctcctcttatagatcgttactgtggcgtgaaaagccctccattaattagatcaacagggagattcatgtggattaagtttagttctgatgaagagcttgaaggactgggatttcgagcaaaatattcatttattccagatccagactttacttacctaggaggtattttaaatcccattccagattgtcagttcgagctctcgggagctgatggaatagtgcgctctagtcaggtagaacaagaggagaaaacaaaaccaggccaagccgttgattgcatctggaccattaaagccactccaaaagctaagatttatttgaggttcctagattatcaaatggagcactcaaatgaatgcaagagaaacttcgttgcagtctatgatggaagcagttctattgaaaacctgaaggccaagttttgcagcactgtggccaatgatgtaatgcttaaaacaggaattggagtgattcgaatgtgggcagatgaaggtagtcggcttagcaggtttcgaatgctctttacttcctttgtggagcctccctgcacaagcagcactttcttttgccatagcaacatgtgcatcaataattctttagtctgtaatggtgtccaaaattgtgcatacccttgggatgaaaatcattgtaaagaaaagaaaaaagcaggagtatttgaacaaatcactaagactcatggaacaattattggcattacttcagggattgtcttggtccttctcattatttctattttagtacaagtgaaacagcctcgaaaaaaggtcatggcttgcaaaaccgcttttaataaaaccgggttccaagaagtgtttgatcctcctcattatgaactgttttcactaagggacaaagagatttctgcagacctggcagacttgtcggaagaattggacaactaccagaagatgcggcgctcctccaccgcctcccgctgcatccacgaccaccactgtgggtcgcaggcctccagcgtcaaacaaagcaggaccaacctcagttccatggaacttcctttccgaaatgactttgcacaaccacagccaatgaaaacatttaatagcaccttcaagaaaagtagttacactttcaaacagggacatgagtgccctgagcaggccctggaagaccgagtaatggaggagattccctgtgaaatttatgtcagggggcgagaagattctgcacaagcatccatatccattgacttctaatcttctgctaatggtgatgtgaattcttagggtgtgtacgtacgcagcctccagggcaccatactgtttccagcagccaacccttttctcccatcacaactacgaagaccttgatttaccgttaacctattgtatggtgatgtttttattctctcaggcagtctatatatgttaaaccaatcaaggaacttactctattcagtggaaacaataatcatctctattgcttggtgtcatttataggaagcactgccagttaaagagcattagaagaggtggttggatggagccaggctcaggctgcctcttcgttttagcaacaagaagactgctcttgactgataacagctctgtcaatattttgatgccacaataaacttgatttttctttacattccttttatttttcctttctctaaatttaatttgttttataagcctatcgttttaccatttcattttcttacataagtacaagtggttaatgtaccacatacttcagtataggcatttgttcttgagtgtgtcaaaatacagctagttactgtgccaattaagacccagttgtatttcacccatctgtttcttcttggctaatctctgtacttctgccttttaattactgggcccttattccttattttctgtgagaaataatagatgatatgatttattacctttcaattatatttttctcagttatactagaaaatttcataatcctgggatatatgtaccattgtcagctatgactaaaaatttgaaaaagataaaaatttctagcaagcctttgaagtttaccaagtatagtcacattcagtgacagcccattcattccagtaaagaatcatttcattcactttgggagaggcctataattacatttatttgcaatgtttctcttcgctagattgttacatagctcccattctgttggttttgcttacagcatatggtaaccaaggttagatgccagttaaaattccttagaaattggatgagccttgagattgcttcttaactgggacatgacatttttctagctcttatcaagaataacaacttccacttttttttaaactgcacttttgactttttttatggtataaaaacaataatttataaacataaaagctcattgtgttttttagacttttgatattatttgatactgtacaaactttattaaatcaagatgaaagacctacaggacagattcctttcagtgttcacatcagtggctttgtatgcaaatatgctgtgttggacctggacgctataacttattgtaaagaccttggaaatgtggacataagctctttctttccttttgttactgtatttagtttgtgataaatttttcactgtgtgatatttatgctctaaatcactacacaaatcccatattaaaatatacattgtacctgaccctttaatcatgttatttatgccaccaaggttgtggatcttaaggtatgtatggaaaggaactcatttatcaaattgtaagtaatacagacatgccatttaaaagaggtaaattcttgttttctatattttgttagtaaattctcaatgaaataagttgaagtttcactggatttcattaacttttaaatattacatatatgtgttttctcagattagtgaaaattgtgaccttaaatttaatacacatatactgcctcagagtgctttctt

SEQ ID NO: 638 - protein, 525 aa, Homo sapiens
MALERLCSVLKVLLITVLVVEGIAVAQKTQDGQNIGIKHIPATQCGIWVRTSNGGHFASPNYPDSYPPNKECIYILEAAPRQRIELTFDEHYYIEPSFECRFDHLEVRDGPFGFSPLIDRYCGVKSPPLIRSTGRFMWIKFSSDEELEGLGFRAKYSFIPDPDFTYLGGILNPIPDCQFELSGADGIVRSSQVEQEEKTKPGQAVDCIWTIKATPKAKIYLRFLDYQMEHSNECKRNFVAVYDGSSSIENLKAKFCSTVANDVMLKTGIGVIRMWADEGSRLSRFRMLFTSFVEPPCTSSTFFCHSNMCINNSLVCNGVQNCAYPWDENHCKEKKKAGVFEQITKTHGTIIGITSGIVLVLLIISILVQVKQPRKKVMACKTAFNKTGFQEVFDPPHYELFSLRDKEISADLADLSEELDNYQKMRRSSTASRCIHDHHCGSQASSVKQSRTNLSSMELPFRNDFAQPQPMKTFNSTFKKSSYTFKQGHECPEQALEDRVMEEIPCEIYVRGREDSAQASISIDF

SEQ ID NO: 639 - DNA, 3671 bp, Homo sapiens
gcacatgcgcacaggcggcgcagccggcacgcggcgctcgcgctccctccttaaatgagcctgggcgccccgcgcccgccacttcagtggatcccgcgccggggccgcgggcggagctgcctgccggtcccgcgccgcgcgtccgcactcctcggccctcgggcggtcgatgggacggggcgccgcggagcaggaggcggcgcccgtcggggtgctcgggccgcgcgggagcccactgtggggctcgggcatggcgggccgcaggacctgagctctcctcaggggagcggggaggcagctgctggccggcgatggggacggagtggggccgtcgccgccgcgccgagccgtgagcgccgagccaccgccgccgctacctcagcccttcgcgaagcgccgggcagctcgggaacatggccctggagcggctctgctcggtcctcaaagtgttgttaataacagtactggtagtggaagggattgccgtggcccaaaaaacccaagatggacaaaatattggaatcaagcatattcctgcaacccagtgtggcatttgggttcgaaccagcaatggaggtcattttgcttcgccaaattatcctgactcatatccaccaaacaaggagtgtatctacattttggaagctgctccacgtcaaagaatagagttgacctttgatgaacattattatatagaaccatcatttgagtgtcggtttgatcacttggaagttcgagatgggccatttggtttctctcctcttatagatcgttactgtggcgtgaaaagccctccattaattagatcaacagggagattcatgtggattaagtttagttctgatgaagagcttgaaggactgggatttcgagcaaaatattcatttattccagatccagactttacttacctaggagattgtcagttcgagctctcgggagctgatggaatagtgcgctctagtcaggtagaacaagaggagaaaacaaaaccaggccaagccgttgattgcatctggaccattaaagccactccaaaagctaagatttatttgaggttcctagattatcaaatggagcactcaaatgaatgcaagagaaacttcgttgcagtctatgatggaagcagttctattgaaaacctgaaggccaagttttgcagcactgtggccaatgatgtaatgcttaaaacaggaattggagtgattcgaatgtgggcagatgaaggtagtcggcttagcaggtttcgaatgctctttacttcctttgtggagcctccctgcacaagcagcactttcttttgccatagcaacatgtgcatcaataattctttagtctgtaatggtgtccaaaattgtgcatacccttgggatgaaaatcattgtaaagaaaagaaaaaagcaggagtatttgaacaaatcactaagactcatggaacaattattggcattacttcagggattgtcttggtccttctcattatttctattttagtacaagtgaaacagcctcgaaaaaaggtcatggcttgcaaaaccgcttttaataaaaccgggttccaagaagtgtttgatcctcctcattatgaactgttttcactaagggacaaagagatttctgcagacctggcagacttgtcggaagaattggacaactaccagaagatgcggcgctcctccaccgcctcccgctgcatccacgaccaccactgtgggtcgcaggcctccagcgtcaaacaaagcaggaccaacctcagttccatggaacttcctttccgaaatgactttgcacaaccacagccaatgaaaacatttaatagcaccttcaagaaaagtagttacactttcaaacagggacatgagtgccctgagcaggccctggaagaccgagtaatggaggagattccctgtgaaatttatgtcagggggcgagaagattctgcacaagcatccatatccattgacttctaatcttctgctaatggtgatgtgaattcttagggtgtgtacgtacgcagcctccagggcaccatactgtttccagcagccaacccttttctcccatcacaactacgaagaccttgatttaccgttaacctattgtatggtgatgtttttattctctcaggcagtctatatatgttaaaccaatcaaggaacttactctattcagtggaaacaataatcatctctattgcttggtgtcatttataggaagcactgccagttaaagagcattagaagaggtggttggatggagccaggctcaggctgcctcttcgttttagcaacaagaagactgctcttgactgataacagctctgtcaatattttgatgccacaataaacttgatttttctttacattccttttatttttcctttctctaaatttaatttgttttataagcctatcgttttaccatttcattttcttacataagtacaagtggttaatgtaccacatacttcagtataggcatttgttcttgagtgtgtcaaaatacagctagttactgtgccaattaagacccagttgtatttcacccatctgtttcttcttggctaatctctgtacttctgccttttaattactgggcccttattccttattttctgtgagaaataatagatgatatgatttattacctttcaattatatttttctcagttatactagaaaatttcataatcctgggatatatgtaccattgtcagctatgactaaaaatttgaaaaagataaaaatttctagcaagcctttgaagtttaccaagtatagtcacattcagtgacagcccattcattccagtaaagaatcatttcattcactttgggagaggcctataattacatttatttgcaatgtttctcttcgctagattgttacatagctcccattctgttggttttgcttacagcatatggtaaccaaggttagatgccagttaaaattccttagaaattggatgagccttgagattgcttcttaactgggacatgacatttttctagctcttatcaagaataacaacttccacttttttttaaactgcacttttgactttttttatggtataaaaacaataatttataaacataaaagctcattgtgttttttagacttttgatattatttgatactgtacaaactttattaaatcaagatgaaagacctacaggacagattcctttcagtgttcacatcagtggctttgtatgcaaatatgctgtgttggacctggacgctataacttattgtaaagaccttggaaatgtggacataagctctttctttccttttgttactgtatttagtttgtgataaatttttcactgtgtgatatttatgctctaaatcactacacaaatcccatattaaaatatacattgtacctgaccctttaatcatgttatttatgccaccaaggttgtggatcttaaggtatgtatggaaaggaactcatttatcaaattgtaagtaatacagacatgccatttaaaagaggtaaattcttgttttctatattttgttagtaaattctcaatgaaataagttgaagtttcactggatttcattaacttttaaatattacatatatgtgttttctcagattagtgaaaattgtgaccttaaatttaatacacatatactgcctcagagtgctttctt

SEQ ID NO: 640 - protein, 518 aa, Homo sapiens
MALERLCSVLKVLLITVLVVEGIAVAQKTQDGQNIGIKHIPATQCGIWVRTSNGGHFASPNYPDSYPPNKECIYILEAAPRQRIELTFDEHYYIEPSFECRFDHLEVRDGPFGFSPLIDRYCGVKSPPLIRSTGRFMWIKFSSDEELEGLGFRAKYSFIPDPDFTYLGDCQFELSGADGIVRSSQVEQEEKTKPGQAVDCIWTIKATPKAKIYLRFLDYQMEHSNECKRNFVAVYDGSSSIENLKAKFCSTVANDVMLKTGIGVIRMWADEGSRLSRFRMLFTSFVEPPCTSSTFFCHSNMCINNSLVCNGVQNCAYPWDENHCKEKKKAGVFEQITKTHGTIIGITSGIVLVLLIISILVQVKQPRKKVMACKTAFNKTGFQEVFDPPHYELFSLRDKEISADLADLSEELDNYQKMRRSSTASRCIHDHHCGSQASSVKQSRTNLSSMELPFRNDFAQPQPMKTFNSTFKKSSYTFKQGHECPEQALEDRVMEEIPCEIYVRGREDSAQASISIDF

SEQ ID NO: 641 - DNA, 4006 bp, Homo sapiens
gaagggcagacagagtgtccaaaagcgtgagagcacgaagtgaggagaaggtggagaagagagaagaggaagaggaagaggaagagaggaagcggagggaactgcggccaggctaaaaggggaagaagaggatcagcccaaggaggaggaagaggaaaacaagacaaacagccagtgcagaggagaggaacgtgtgtccagtgtcccgatccctgcggagctagtagctgagagctctgtgccctgggcaccttgcagccctgcacctgcctgccacttccccaccgaggccatgggcccaggagttctgctgctcctgctggtggccacagcttggcatggtcagggaatcccagtgatagagcccagtgtccctgagctggtcgtgaagccaggagcaacggtgaccttgcgatgtgtgggcaatggcagcgtggaatgggatggccccccatcacctcactggaccctgtactctgatggctccagcagcatcctcagcaccaacaacgctaccttccaaaacacggggacctatcgctgcactgagcctggagaccccctgggaggcagcgccgccatccacctctatgtcaaagaccctgcccggccctggaacgtgctagcacaggaggtggtcgtgttcgaggaccaggacgcactactgccctgtctgctcacagacccggtgctggaagcaggcgtctcgctggtgcgtgtgcgtggccggcccctcatgcgccacaccaactactccttctcgccctggcatggcttcaccatccacagggccaagttcattcagagccaggactatcaatgcagtgccctgatgggtggcaggaaggtgatgtccatcagcatccggctgaaagtgcagaaagtcatcccagggcccccagccttgacactggtgcctgcagagctggtgcggattcgaggggaggctgcccagatcgtgtgctcagccagcagcgttgatgttaactttgatgtcttcctccaacacaacaacaccaagctcgcaatccctcaacaatctgactttcataataaccgttaccaaaaagtcctgaccctcaacctcgatcaagtagatttccaacatgccggcaactactcctgcgtggccagcaacgtgcagggcaagcactccacctccatgttcttccgggtggtagagagtgcctacttgaacttgagctctgagcagaacctcatccaggaggtgaccgtgggggaggggctcaacctcaaagtcatggtggaggcctacccaggcctgcaaggttttaactggacctacctgggacccttttctgaccaccagcctgagcccaagcttgctaatgctaccaccaaggacacatacaggcacaccttcaccctctctctgccccgcctgaagccctctgaggctggccgctactccttcctggccagaaacccaggaggctggagagctctgacgtttgagctcacccttcgataccccccagaggtaagcgtcatatggacattcatcaacggctctggcacccttttgtgtgctgcctctgggtacccccagcccaacgtgacatggctgcagtgcagtggccacactgataggtgtgatgaggcccaagtgctgcaggtctgggatgacccataccctgaggtcctgagccaggagcccttccacaaggtgacggtgcagagcctgctgactgttgagaccttagagcacaaccaaacctacgagtgcagggcccacaacagcgtggggagtggctcctgggccttcatacccatctctgcaggagcccacacgcatcccccggatgagttcctcttcacaccagtggtggtcgcctgcatgtccatcatggccttgctgctgctgctgctcctgctgctattgtacaagtataagcagaagcccaagtaccaggtccgctggaagatcatcgagagctatgagggcaacagttatactttcatcgaccccacgcagctgccttacaacgagaagtgggagttcccccggaacaacctgcagtttggtaagaccctcggagctggagcctttgggaaggtggtggaggccacggcctttggtctgggcaaggaggatgctgtcctgaaggtggctgtgaagatgctgaagtccacggcccatgctgatgagaaggaggccctcatgtccgagctgaagatcatgagccacctgggccagcacgagaacatcgtcaaccttctgggagcctgtacccatggaggccctgtactggtcatcacggagtactgttgctatggcgacctgctcaactttctgcgaaggaaggctgaggccatgctgggacccagcctgagccccggccaggaccccgagggaggcgtcgactataagaacatccacctcgagaagaaatatgtccgcagggacagtggcttctccagccagggtgtggacacctatgtggagatgaggcctgtctccacttcttcaaatgactccttctctgagcaagacctggacaaggaggatggacggcccctggagctccgggacctgcttcacttctccagccaagtagcccagggcatggccttcctcgcttccaagaattgcatccaccgggacgtggcagcgcgtaacgtgctgttgaccaatggtcatgtggccaagattggggacttcgggctggctagggacatcatgaatgactccaactacattgtcaagggcaatgcccgcctgcctgtgaagtggatggccccagagagcatctttgactgtgtctacacggttcagagcgacgtctggtcctatggcatcctcctctgggagatcttctcacttgggctgaatccctaccctggcatcctggtgaacagcaagttctataaactggtgaaggatggataccaaatggcccagcctgcatttgccccaaagaatatatacagcatcatgcaggcctgctgggccttggagcccacccacagacccaccttccagcagatctgctccttccttcaggagcaggcccaagaggacaggagagagcgggactataccaatctgccgagcagcagcagaagcggtggcagcggcagcagcagcagtgagctggaggaggagagctctagtgagcacctgacctgctgcgagcaaggggatatcgcccagcccttgctgcagcccaacaactatcagttctgctgaggagttgacgacagggagtaccactctcccctcccacaaacttcaactcctccatggatggggcgacacggggagaacatacaaactctgccttcggtcatttcactcaacagctcggcccagctctgaaacttgggaaggtgagggattcaggggaggtcagaggatcccacttcctgagcatgggccatcactgccagtcaggggctgggggctgagccctcacccccccctcccctactgttctcatggtgttggcctcgtgtttgctatgccaactagtagaaccttctttcctaatccccttatcttcatggaaatggactgactttatgcctatgaagtccccaggagctacactgatactgagaaaaccaggctctttggggctagacagactggcagagagtgagatctccctctctgagaggagcagcagatgctcacagaccacactcagctcaggccccttggagcaggatggctcctctaagaatctcacaggacctcttagtctctgccctatacgccgccttcactccacagcctcacccctcccacccccatactggtactgctgtaatgagccaagtggcagctaaaagttgggggtgttctgcccagtcccgtcattctgggctagaaggcaggggaccttggcatgtggctggccacaccaagcaggaagcacaaactcccccaagctgactcatcctaactaacagtcacgccgtgggatgtctctgtccacattaaactaacagcattaatgcagtcaaaaaaaaaaaaaaaaaa

SEQ ID NO: 642 - protein, 972 aa, Homo sapiens
MGPGVLLLLLVATAWHGQGIPVIEPSVPELVVKPGATVTLRCVGNGSVEWDGPPSPHWTLYSDGSSSILSTNNATFQNTGTYRCTEPGDPLGGSAAIHLYVKDPARPWNVLAQEVVVFEDQDALLPCLLTDPVLEAGVSLVRVRGRPLMRHTNYSFSPWHGFTIHRAKFIQSQDYQCSALMGGRKVMSISIRLKVQKVIPGPPALTLVPAELVRIRGEAAQIVCSASSVDVNFDVFLQHNNTKLAIPQQSDFHNNRYQKVLTLNLDQVDFQHAGNYSCVASNVQGKHSTSMFFRVVESAYLNLSSEQNLIQEVTVGEGLNLKVMVEAYPGLQGFNWTYLGPFSDHQPEPKLANATTKDTYRHTFTLSLPRLKPSEAGRYSFLARNPGGWRALTFELTLRYPPEVSVIWTFINGSGTLLCAASGYPQPNVTWLQCSGHTDRCDEAQVLQVWDDPYPEVLSQEPFHKVTVQSLLTVETLEHNQTYECRAHNSVGSGSWAFIPISAGAHTHPPDEFLFTPVVVACMSIMALLLLLLLLLLYKYKQKPKYQVRWKIIESYEGNSYTFIDPTQLPYNEKWEFPRNNLQFGKTLGAGAFGKVVEATAFGLGKEDAVLKVAVKMLKSTAHADEKEALMSELKIMSHLGQHENIVNLLGACTHGGPVLVITEYCCYGDLLNFLRRKAEAMLGPSLSPGQDPEGGVDYKNIHLEKKYVRRDSGFSSQGVDTYVEMRPVSTSSNDSFSEQDLDKEDGRPLELRDLLHFSSQVAQGMAFLASKNCIHRDVAARNVLLTNGHVAKIGDFGLARDIMNDSNYIVKGNARLPVKWMAPESIFDCVYTVQSDVWSYGILLWEIFSLGLNPYPGILVNSKFYKLVKDGYQMAQPAFAPKNIYSIMQACWALEPTHRPTFQQICSFLQEQAQEDRRERDYTNLPSSSRSGGSGSSSSELEEESSSEHLTCCEQGDIAQPLLQPNNYQFC

SEQ ID NO: 643 - DNA, 3986 bp, Homo sapiens
ccctgccccagactgcgacccctccctcttgggttcaaggctttgttttcttcttaaagacccaagatttccaaactctgtggttgccttgcctagctaaaaggggaagaagaggatcagcccaaggaggaggaagaggaaaacaagacaaacagccagtgcagaggagaggaacgtgtgtccagtgtcccgatccctgcggagctagtagctgagagctctgtgccctgggcaccttgcagccctgcacctgcctgccacttccccaccgaggccatgggcccaggagttctgctgctcctgctggtggccacagcttggcatggtcagggaatcccagtgatagagcccagtgtccctgagctggtcgtgaagccaggagcaacggtgaccttgcgatgtgtgggcaatggcagcgtggaatgggatggccccccatcacctcactggaccctgtactctgatggctccagcagcatcctcagcaccaacaacgctaccttccaaaacacggggacctatcgctgcactgagcctggagaccccctgggaggcagcgccgccatccacctctatgtcaaagaccctgcccggccctggaacgtgctagcacaggaggtggtcgtgttcgaggaccaggacgcactactgccctgtctgctcacagacccggtgctggaagcaggcgtctcgctggtgcgtgtgcgtggccggcccctcatgcgccacaccaactactccttctcgccctggcatggcttcaccatccacagggccaagttcattcagagccaggactatcaatgcagtgccctgatgggtggcaggaaggtgatgtccatcagcatccggctgaaagtgcagaaagtcatcccagggcccccagccttgacactggtgcctgcagagctggtgcggattcgaggggaggctgcccagatcgtgtgctcagccagcagcgttgatgttaactttgatgtcttcctccaacacaacaacaccaagctcgcaatccctcaacaatctgactttcataataaccgttaccaaaaagtcctgaccctcaacctcgatcaagtagatttccaacatgccggcaactactcctgcgtggccagcaacgtgcagggcaagcactccacctccatgttcttccgggtggtagagagtgcctacttgaacttgagctctgagcagaacctcatccaggaggtgaccgtgggggaggggctcaacctcaaagtcatggtggaggcctacccaggcctgcaaggttttaactggacctacctgggacccttttctgaccaccagcctgagcccaagcttgctaatgctaccaccaaggacacatacaggcacaccttcaccctctctctgccccgcctgaagccctctgaggctggccgctactccttcctggccagaaacccaggaggctggagagctctgacgtttgagctcacccttcgataccccccagaggtaagcgtcatatggacattcatcaacggctctggcacccttttgtgtgctgcctctgggtacccccagcccaacgtgacatggctgcagtgcagtggccacactgataggtgtgatgaggcccaagtgctgcaggtctgggatgacccataccctgaggtcctgagccaggagcccttccacaaggtgacggtgcagagcctgctgactgttgagaccttagagcacaaccaaacctacgagtgcagggcccacaacagcgtggggagtggctcctgggccttcatacccatctctgcaggagcccacacgcatcccccggatgagttcctcttcacaccagtggtggtcgcctgcatgtccatcatggccttgctgctgctgctgctcctgctgctattgtacaagtataagcagaagcccaagtaccaggtccgctggaagatcatcgagagctatgagggcaacagttatactttcatcgaccccacgcagctgccttacaacgagaagtgggagttcccccggaacaacctgcagtttggtaagaccctcggagctggagcctttgggaaggtggtggaggccacggcctttggtctgggcaaggaggatgctgtcctgaaggtggctgtgaagatgctgaagtccacggcccatgctgatgagaaggaggccctcatgtccgagctgaagatcatgagccacctgggccagcacgagaacatcgtcaaccttctgggagcctgtacccatggaggccctgtactggtcatcacggagtactgttgctatggcgacctgctcaactttctgcgaaggaaggctgaggccatgctgggacccagcctgagccccggccaggaccccgagggaggcgtcgactataagaacatccacctcgagaagaaatatgtccgcagggacagtggcttctccagccagggtgtggacacctatgtggagatgaggcctgtctccacttcttcaaatgactccttctctgagcaagacctggacaaggaggatggacggcccctggagctccgggacctgcttcacttctccagccaagtagcccagggcatggccttcctcgcttccaagaattgcatccaccgggacgtggcagcgcgtaacgtgctgttgaccaatggtcatgtggccaagattggggacttcgggctggctagggacatcatgaatgactccaactacattgtcaagggcaatgcccgcctgcctgtgaagtggatggccccagagagcatctttgactgtgtctacacggttcagagcgacgtctggtcctatggcatcctcctctgggagatcttctcacttgggctgaatccctaccctggcatcctggtgaacagcaagttctataaactggtgaaggatggataccaaatggcccagcctgcatttgccccaaagaatatatacagcatcatgcaggcctgctgggccttggagcccacccacagacccaccttccagcagatctgctccttccttcaggagcaggcccaagaggacaggagagagcgggactataccaatctgccgagcagcagcagaagcggtggcagcggcagcagcagcagtgagctggaggaggagagctctagtgagcacctgacctgctgcgagcaaggggatatcgcccagcccttgctgcagcccaacaactatcagttctgctgaggagttgacgacagggagtaccactctcccctcccacaaacttcaactcctccatggatggggcgacacggggagaacatacaaactctgccttcggtcatttcactcaacagctcggcccagctctgaaacttgggaaggtgagggattcaggggaggtcagaggatcccacttcctgagcatgggccatcactgccagtcaggggctgggggctgagccctcacccccccctcccctactgttctcatggtgttggcctcgtgtttgctatgccaactagtagaaccttctttcctaatccccttatcttcatggaaatggactgactttatgcctatgaagtccccaggagctacactgatactgagaaaaccaggctctttggggctagacagactggcagagagtgagatctccctctctgagaggagcagcagatgctcacagaccacactcagctcaggccccttggagcaggatggctcctctaagaatctcacaggacctcttagtctctgccctatacgccgccttcactccacagcctcacccctcccacccccatactggtactgctgtaatgagccaagtggcagctaaaagttgggggtgttctgcccagtcccgtcattctgggctagaaggcaggggaccttggcatgtggctggccacaccaagcaggaagcacaaactcccccaagctgactcatcctaactaacagtcacgccgtgggatgtctctgtccacattaaactaacagcattaatgcagtcaaaaaaaaaaaaaa

SEQ ID NO: 644 - protein, 972 aa, Homo sapiens; identical to SEQ ID NO: 642

SEQ ID NO: 645 - DNA, 4087 bp, Homo sapiens
ctcttttgcctgccatcatgttggatgtgattctgctcctcctttgccttccactatgattctgaggcctcctcagccatgctgaactgtttacctgttctggatgtttcatatagatggagtcgtatgacattttgctactggcttcattgacttaacacagtgttttcaaggttcatccacagtgtagcagctaaaaggggaagaagaggatcagcccaaggaggaggaagaggaaaacaagacaaacagccagtgcagaggagaggaacgtgtgtccagtgtcccgatccctgcggagctagtagctgagagctctgtgccctgggcaccttgcagccctgcacctgcctgccacttccccaccgaggccatgggcccaggagttctgctgctcctgctggtggccacagcttggcatggtcagggaatcccagtgatagagcccagtgtccctgagctggtcgtgaagccaggagcaacggtgaccttgcgatgtgtgggcaatggcagcgtggaatgggatggccccccatcacctcactggaccctgtactctgatggctccagcagcatcctcagcaccaacaacgctaccttccaaaacacggggacctatcgctgcactgagcctggagaccccctgggaggcagcgccgccatccacctctatgtcaaagaccctgcccggccctggaacgtgctagcacaggaggtggtcgtgttcgaggaccaggacgcactactgccctgtctgctcacagacccggtgctggaagcaggcgtctcgctggtgcgtgtgcgtggccggcccctcatgcgccacaccaactactccttctcgccctggcatggcttcaccatccacagggccaagttcattcagagccaggactatcaatgcagtgccctgatgggtggcaggaaggtgatgtccatcagcatccggctgaaagtgcagaaagtcatcccagggcccccagccttgacactggtgcctgcagagctggtgcggattcgaggggaggctgcccagatcgtgtgctcagccagcagcgttgatgttaactttgatgtcttcctccaacacaacaacaccaagctcgcaatccctcaacaatctgactttcataataaccgttaccaaaaagtcctgaccctcaacctcgatcaagtagatttccaacatgccggcaactactcctgcgtggccagcaacgtgcagggcaagcactccacctccatgttcttccgggtggtagagagtgcctacttgaacttgagctctgagcagaacctcatccaggaggtgaccgtgggggaggggctcaacctcaaagtcatggtggaggcctacccaggcctgcaaggttttaactggacctacctgggacccttttctgaccaccagcctgagcccaagcttgctaatgctaccaccaaggacacatacaggcacaccttcaccctctctctgccccgcctgaagccctctgaggctggccgctactccttcctggccagaaacccaggaggctggagagctctgacgtttgagctcacccttcgataccccccagaggtaagcgtcatatggacattcatcaacggctctggcacccttttgtgtgctgcctctgggtacccccagcccaacgtgacatggctgcagtgcagtggccacactgataggtgtgatgaggcccaagtgctgcaggtctgggatgacccataccctgaggtcctgagccaggagcccttccacaaggtgacggtgcagagcctgctgactgttgagaccttagagcacaaccaaacctacgagtgcagggcccacaacagcgtggggagtggctcctgggccttcatacccatctctgcaggagcccacacgcatcccccggatgagttcctcttcacaccagtggtggtcgcctgcatgtccatcatggccttgctgctgctgctgctcctgctgctattgtacaagtataagcagaagcccaagtaccaggtccgctggaagatcatcgagagctatgagggcaacagttatactttcatcgaccccacgcagctgccttacaacgagaagtgggagttcccccggaacaacctgcagtttggtaagaccctcggagctggagcctttgggaaggtggtggaggccacggcctttggtctgggcaaggaggatgctgtcctgaaggtggctgtgaagatgctgaagtccacggcccatgctgatgagaaggaggccctcatgtccgagctgaagatcatgagccacctgggccagcacgagaacatcgtcaaccttctgggagcctgtacccatggaggccctgtactggtcatcacggagtactgttgctatggcgacctgctcaactttctgcgaaggaaggctgaggccatgctgggacccagcctgagccccggccaggaccccgagggaggcgtcgactataagaacatccacctcgagaagaaatatgtccgcagggacagtggcttctccagccagggtgtggacacctatgtggagatgaggcctgtctccacttcttcaaatgactccttctctgagcaagacctggacaaggaggatggacggcccctggagctccgggacctgcttcacttctccagccaagtagcccagggcatggccttcctcgcttccaagaattgcatccaccgggacgtggcagcgcgtaacgtgctgttgaccaatggtcatgtggccaagattggggacttcgggctggctagggacatcatgaatgactccaactacattgtcaagggcaatgcccgcctgcctgtgaagtggatggccccagagagcatctttgactgtgtctacacggttcagagcgacgtctggtcctatggcatcctcctctgggagatcttctcacttgggctgaatccctaccctggcatcctggtgaacagcaagttctataaactggtgaaggatggataccaaatggcccagcctgcatttgccccaaagaatatatacagcatcatgcaggcctgctgggccttggagcccacccacagacccaccttccagcagatctgctccttccttcaggagcaggcccaagaggacaggagagagcgggactataccaatctgccgagcagcagcagaagcggtggcagcggcagcagcagcagtgagctggaggaggagagctctagtgagcacctgacctgctgcgagcaaggggatatcgcccagcccttgctgcagcccaacaactatcagttctgctgaggagttgacgacagggagtaccactctcccctcccacaaacttcaactcctccatggatggggcgacacggggagaacatacaaactctgccttcggtcatttcactcaacagctcggcccagctctgaaacttgggaaggtgagggattcaggggaggtcagaggatcccacttcctgagcatgggccatcactgccagtcaggggctgggggctgagccctcacccccccctcccctactgttctcatggtgttggcctcgtgtttgctatgccaactagtagaaccttctttcctaatccccttatcttcatggaaatggactgactttatgcctatgaagtccccaggagctacactgatactgagaaaaccaggctctttggggctagacagactggcagagagtgagatctccctctctgagaggagcagcagatgctcacagaccacactcagctcaggccccttggagcaggatggctcctctaagaatctcacaggacctcttagtctctgccctatacgccgccttcactccacagcctcacccctcccacccccatactggtactgctgtaatgagccaagtggcagctaaaagttgggggtgttctgcccagtcccgtcattctgggctagaaggcaggggaccttggcatgtggctggccacaccaagcaggaagcacaaactcccccaagctgactcatcctaactaacagtcacgccgtgggatgtctctgtccacattaaactaacagcattaatgcagtcaaaaaaaaaaaaaaaaaa

SEQ ID NO: 646 - protein, 972 aa, Homo sapiens; identical to SEQ ID NO: 642

SEQ ID NO: 647 - DNA, 2058 bp, Homo sapiens
gcacataacgggcagaacgcactgcgaagcggcttcttcagagcacgggctggaactggcaggcaccgcgagcccctagcacccgacaagctgagtgtgcaggacgagtccccaccacacccacaccacagccgctgaatgaggcttccaggcgtccgctcgcggcccgcagagccccgccgtgggtccgcccgctgaggcgcccccagccagtgcgctcacctgccagactgcgcgccatggggcaacccgggaacggcagcgccttcttgctggcacccaatagaagccatgcgccggaccacgacgtcacgcagcaaagggacgaggtgtgggtggtgggcatgggcatcgtcatgtctctcatcgtcctggccatcgtgtttggcaatgtgctggtcatcacagccattgccaagttcgagcgtctgcagacggtcaccaactacttcatcacttcactggcctgtgctgatctggtcatgggcctggcagtggtgccctttggggccgcccatattcttatgaaaatgtggacttttggcaacttctggtgcgagttttggacttccattgatgtgctgtgcgtcacggccagcattgagaccctgtgcgtgatcgcagtggatcgctactttgccattacttcacctttcaagtaccagagcctgctgaccaagaataaggcccgggtgatcattctgatggtgtggattgtgtcaggccttacctccttcttgcccattcagatgcactggtaccgggccacccaccaggaagccatcaactgctatgccaatgagacctgctgtgacttcttcacgaaccaagcctatgccattgcctcttccatcgtgtccttctacgttcccctggtgatcatggtcttcgtctactccagggtctttcaggaggccaaaaggcagctccagaagattgacaaatctgagggccgcttccatgtccagaaccttagccaggtggagcaggatgggcggacggggcatggactccgcagatcttccaagttctgcttgaaggagcacaaagccctcaagacgttaggcatcatcatgggcactttcaccctctgctggctgcccttcttcatcgttaacattgtgcatgtgatccaggataacctcatccgtaaggaagtttacatcctcctaaattggataggctatgtcaattctggtttcaatccccttatctactgccggagcccagatttcaggattgccttccaggagcttctgtgcctgcgcaggtcttctttgaaggcctatgggaatggctactccagcaacggcaacacaggggagcagagtggatatcacgtggaacaggagaaagaaaataaactgctgtgtgaagacctcccaggcacggaagactttgtgggccatcaaggtactgtgcctagcgataacattgattcacaagggaggaattgtagtacaaatgactcactgctgtaaagcagtttttctacttttaaagacccccccccccaacagaacactaaacagactatttaacttgagggtaataaacttagaataaaattgtaaaattgtatagagatatgcagaaggaagggcatccttctgccttttttatttttttaagctgtaaaaagagagaaaacttatttgagtgattatttgttatttgtacagttcagttcctctttgcatggaatttgtaagtttatgtctaaagagctttagtcctagaggacctgagtctgctatattttcatgacttttccatgtatctacctcactattcaagtattaggggtaatatattgctgctggtaatttgtatctgaaggagattttccttcctacacccttggacttgaggattttgagtatctcggacctttcagctgtgaacatggactcttcccccactcctcttatttgctcacacggggtattttaggcagggatttgaggagcagcttcagttgttttcccgagcaaagtctaaagtttacagtaaataaattgtttgaccatgccttcattgcaaaaaaaaaaaaaaaaa

SEQ ID NO: 648 - protein, 413 aa, Homo sapiens
MGQPGNGSAFLLAPNRSHAPDHDVTQQRDEVWVVGMGIVMSLIVLAIVFGNVLVITAIAKFERLQTVTNYFITSLACADLVMGLAVVPFGAAHILMKMWTFGNFWCEFWTSIDVLCVTASIETLCVIAVDRYFAITSPFKYQSLLTKNKARVIILMVWIVSGLTSFLPIQMHWYRATHQEAINCYANETCCDFFTNQAYAIASSIVSFYVPLVIMVFVYSRVFQEAKRQLQKIDKSEGRFHVQNLSQVEQDGRTGHGLRRSSKFCLKEHKALKTLGIIMGTFTLCWLPFFIVNIVHVIQDNLIRKEVYILLNWIGYVNSGFNPLIYCRSPDFRIAFQELLCLRRSSLKAYGNGYSSNGNTGEQSGYHVEQEKENKLLCEDLPGTEDFVGHQGTVPSDNIDSQGRNCSTNDSLL

SEQ ID NO: 649 - DNA, 3849 bp, Homo sapiens
cccttttgcttacttcctagtcccgggcaggccggctcggaggcagcgagaaagcgcagccaggcggctgctcggcgttctctcaggtgactgctcggagttctcccagtgtttggtgttgcaagcaggatccaaaggagacctatagtgactcccaggagctcttagtgaccaagtgaaggcaggaagacagggttctgatggtgtgagtctccttcaactcagcaaaccaccttggtctgcctcgagtttccaacacccctcctgcctgctagtgataggtgtgaggcaggttgatgaacatggaacttttttcttttggtcccaaagcatgctactcctggagtttcattcagtgaatgagaactatagtttggttctgtgagatctctatgaatcaaggcggccactgaagcggagaaaagaaatgcttaaatgttaagaaagtttgaagtgcagaaaaaggttgaagcactggacaatgccacatactttgtggatggtgtgggtcttgggggtcatcatcagcctctccaaggaagaatcctccaatcaggcttctctgtcttgtgaccgcaatggtatctgcaagggcagctcaggatctttaaactccattccctcagggctcacagaagctgtaaaaagccttgacctgtccaacaacaggatcacctacattagcaacagtgacctacagaggtgtgtgaacctccaggctctggtgctgacatccaatggaattaacacaatagaggaagattctttttcttccctgggcagtcttgaacatttagacttatcctataattacttatctaatttatcgtcttcctggttcaagcccctttcttctttaacattcttaaacttactgggaaatccttacaaaaccctaggggaaacatctcttttttctcatctcacaaaattgcaaatcctgagagtgggaaatatggacaccttcactaagattcaaagaaaagattttgctggacttaccttccttgaggaacttgagattgatgcttcagatctacagagctatgagccaaaaagtttgaagtcaattcagaatgtaagtcatctgatccttcatatgaagcagcatattttactgctggagatttttgtagatgttacaagttccgtggaatgtttggaactgcgagatactgatttggacactttccatttttcagaactatccactggtgaaacaaattcattgattaaaaagtttacatttagaaatgtgaaaatcaccgatgaaagtttgtttcaggttatgaaacttttgaatcagatttctggattgttagaattagagtttgatgactgtacccttaatggagttggtaattttagagcatctgataatgacagagttatagatccaggtaaagtggaaacgttaacaatccggaggctgcatattccaaggttttacttattttatgatctgagcactttatattcacttacagaaagagttaaaagaatcacagtagaaaacagtaaagtttttctggttccttgtttactttcacaacatttaaaatcattagaatacttggatctcagtgaaaatttgatggttgaagaatacttgaaaaattcagcctgtgaggatgcctggccctctctacaaactttaattttaaggcaaaatcatttggcatcattggaaaaaaccggagagactttgctcactctgaaaaacttgactaacattgatatcagtaagaatagttttcattctatgcctgaaacttgtcagtggccagaaaagatgaaatatttgaacttatccagcacacgaatacacagtgtaacaggctgcattcccaagacactggaaattttagatgttagcaacaacaatctcaatttattttctttgaatttgccgcaactcaaagaactttatatttccagaaataagttgatgactctaccagatgcctccctcttacccatgttactagtattgaaaatcagtaggaatgcaataactacgttttctaaggagcaacttgactcatttcacacactgaagactttggaagctggtggcaataacttcatttgctcctgtgaattcctctccttcactcaggagcagcaagcactggccaaagtcttgattgattggccagcaaattacctgtgtgactctccatcccatgtgcgtggccagcaggttcaggatgtccgcctctcggtgtcggaatgtcacaggacagcactggtgtctggcatgtgctgtgctctgttcctgctgatcctgctcacgggggtcctgtgccaccgtttccatggcctgtggtatatgaaaatgatgtgggcctggctccaggccaaaaggaagcccaggaaagctcccagcaggaacatctgctatgatgcatttgtttcttacagtgagcgggatgcctactgggtggagaaccttatggtccaggagctggagaacttcaatccccccttcaagttgtgtcttcataagcgggacttcattcctggcaagtggatcattgacaatatcattgactccattgaaaagagccacaaaactgtctttgtgctttctgaaaactttgtgaagagtgagtggtgcaagtatgaactggacttctcccatttccgtctttttgatgagaacaatgatgctgccattctcattcttctggagcccattgagaaaaaagccattccccagcgcttctgcaagctgcggaagataatgaacaccaagacctacctggagtggcccatggacgaggctcagcgggaaggattttgggtaaatctgagagctgcgataaagtcctaggttcccatatttaagaccagtctttgtctagttgggatctttatgtcactagttatagttaagttcattcagacataattatataaaaactacgtggatgtaccgtcatttgaggacttgcttactaaaactacaaaacttcaaattttgtctggggtgctgttttataaacatatgccagatttaaaaattggtttttggtttttcttttttctatgagataaccatgatcataagtctattactgatatctgaatatagtcccttggtatccaagggaattggttgcaggatcctcgtggatatcaaaattcatagatgatcaagtcccttataagagtggcatagtatttgcatataacctgtgtacattctcctgtatactttaaatcatctctagattacttatgatacccaatacaatgtaaatactatgtaaatagttgtactgtctttttatttatattattattgttattttttattttcaaaatttttaaaacatacttttgatccacagttggttgacttcatggatgcagaacccatggatatagagggccaactgtaatctgtagcaactggcttagttcattaggaaacagcacaaatgaacttaagattctcaatgactgtgtcattctttcttcctgctaagagactcctctgtggccacaaaaggcattctctgtcctacctagctgtcacttctctgtgcagctgatctcaagagcaacaaggcaaagtatttggggcactccccaaaacttgttgctattcctagaaaaaagtgctgtgtatttcctattaaactttacaggatgagaaatactagagggtgtattttcatgtgatctggatctgtctttctggctattagataggtttctccagccatagttacttgagagagtgagtacacagtgcaaggtacagtaaattatgtatttctgtaatttaacaaaataaatactcagtttaggagaatttgaaagacaaaaaaaaaaaaaaaa

SEQ ID NO: 650 - protein, 784 aa, Homo sapiens
MPHTLWMVWVLGVIISLSKEESSNQASLSCDRNGICKGSSGSLNSIPSGLTEAVKSLDLSNNRITYISNSDLQRCVNLQALVLTSNGINTIEEDSFSSLGSLEHLDLSYNYLSNLSSSWFKPLSSLTFLNLLGNPYKTLGETSLFSHLTKLQILRVGNMDTFTKIQRKDFAGLTFLEELEIDASDLQSYEPKSLKSIQNVSHLILHMKQHILLLEIFVDVTSSVECLELRDTDLDTFHFSELSTGETNSLIKKFTFRNVKITDESLFQVMKLLNQISGLLELEFDDCTLNGVGNFRASDNDRVIDPGKVETLTIRRLHIPRFYLFYDLSTLYSLTERVKRITVENSKVFLVPCLLSQHLKSLEYLDLSENLMVEEYLKNSACEDAWPSLQTLILRQNHLASLEKTGETLLTLKNLTNIDISKNSFHSMPETCQWPEKMKYLNLSSTRIHSVTGCIPKTLEILDVSNNNLNLFSLNLPQLKELYISRNKLMTLPDASLLPMLLVLKISRNAITTFSKEQLDSFHTLKTLEAGGNNFICSCEFLSFTQEQQALAKVLIDWPANYLCDSPSHVRGQQVQDVRLSVSECHRTALVSGMCCALFLLILLTGVLCHRFHGLWYMKMMWAWLQAKRKPRKAPSRNICYDAFVSYSERDAYWVENLMVQELENFNPPFKLCLHKRDFIPGKWIIDNIIDSIEKSHKTVFVLSENFVKSEWCKYELDFSHFRLFDENNDAAILILLEPIEKKAIPQRFCKLRKIMNTKTYLEWPMDEAQREGFWVNLRAAIKS

SEQ ID NO: 651 - DNA, 3639 bp, Homo sapiens
cccttttgcttacttcctagtcccgggcaggccggctcggaggcagcgagaaagcgcagccaggcggctgctcggcgttctctcaggtgactgctcggagttctcccagtttctcttttaacagtgtttggtgttgcaagcaggatccaaaggagacctatagtgactcccaggagctcttagtgaccaagtgaaggtacctgtggggctcattgtgcccattgctctttcactgctttcaactggtagttgtgggttgaagcactggacaatgccacatactttgtggatggtgtgggtcttgggggtcatcatcagcctctccaaggaagaatcctccaatcaggcttctctgtcttgtgaccgcaatggtatctgcaagggcagctcaggatctttaaactccattccctcagggctcacagaagctgtaaaaagccttgacctgtccaacaacaggatcacctacattagcaacagtgacctacagaggtgtgtgaacctccaggctctggtgctgacatccaatggaattaacacaatagaggaagattctttttcttccctgggcagtcttgaacatttagacttatcctataattacttatctaatttatcgtcttcctggttcaagcccctttcttctttaacattcttaaacttactgggaaatccttacaaaaccctaggggaaacatctcttttttctcatctcacaaaattgcaaatcctgagagtgggaaatatggacaccttcactaagattcaaagaaaagattttgctggacttaccttccttgaggaacttgagattgatgcttcagatctacagagctatgagccaaaaagtttgaagtcaattcagaatgtaagtcatctgatccttcatatgaagcagcatattttactgctggagatttttgtagatgttacaagttccgtggaatgtttggaactgcgagatactgatttggacactttccatttttcagaactatccactggtgaaacaaattcattgattaaaaagtttacatttagaaatgtgaaaatcaccgatgaaagtttgtttcaggttatgaaacttttgaatcagatttctggattgttagaattagagtttgatgactgtacccttaatggagttggtaattttagagcatctgataatgacagagttatagatccaggtaaagtggaaacgttaacaatccggaggctgcatattccaaggttttacttattttatgatctgagcactttatattcacttacagaaagagttaaaagaatcacagtagaaaacagtaaagtttttctggttccttgtttactttcacaacatttaaaatcattagaatacttggatctcagtgaaaatttgatggttgaagaatacttgaaaaattcagcctgtgaggatgcctggccctctctacaaactttaattttaaggcaaaatcatttggcatcattggaaaaaaccggagagactttgctcactctgaaaaacttgactaacattgatatcagtaagaatagttttcattctatgcctgaaacttgtcagtggccagaaaagatgaaatatttgaacttatccagcacacgaatacacagtgtaacaggctgcattcccaagacactggaaattttagatgttagcaacaacaatctcaatttattttctttgaatttgccgcaactcaaagaactttatatttccagaaataagttgatgactctaccagatgcctccctcttacccatgttactagtattgaaaatcagtaggaatgcaataactacgttttctaaggagcaacttgactcatttcacacactgaagactttggaagctggtggcaataacttcatttgctcctgtgaattcctctccttcactcaggagcagcaagcactggccaaagtcttgattgattggccagcaaattacctgtgtgactctccatcccatgtgcgtggccagcaggttcaggatgtccgcctctcggtgtcggaatgtcacaggacagcactggtgtctggcatgtgctgtgctctgttcctgctgatcctgctcacgggggtcctgtgccaccgtttccatggcctgtggtatatgaaaatgatgtgggcctggctccaggccaaaaggaagcccaggaaagctcccagcaggaacatctgctatgatgcatttgtttcttacagtgagcgggatgcctactgggtggagaaccttatggtccaggagctggagaacttcaatccccccttcaagttgtgtcttcataagcgggacttcattcctggcaagtggatcattgacaatatcattgactccattgaaaagagccacaaaactgtctttgtgctttctgaaaactttgtgaagagtgagtggtgcaagtatgaactggacttctcccatttccgtctttttgatgagaacaatgatgctgccattctcattcttctggagcccattgagaaaaaagccattccccagcgcttctgcaagctgcggaagataatgaacaccaagacctacctggagtggcccatggacgaggctcagcgggaaggattttgggtaaatctgagagctgcgataaagtcctaggttcccatatttaagaccagtctttgtctagttgggatctttatgtcactagttatagttaagttcattcagacataattatataaaaactacgtggatgtaccgtcatttgaggacttgcttactaaaactacaaaacttcaaattttgtctggggtgctgttttataaacatatgccagatttaaaaattggtttttggtttttcttttttctatgagataaccatgatcataagtctattactgatatctgaatatagtcccttggtatccaagggaattggttgcaggatcctcgtggatatcaaaattcatagatgatcaagtcccttataagagtggcatagtatttgcatataacctgtgtacattctcctgtatactttaaatcatctctagattacttatgatacccaatacaatgtaaatactatgtaaatagttgtactgtctttttatttatattattattgttattttttattttcaaaatttttaaaacatacttttgatccacagttggttgacttcatggatgcagaacccatggatatagagggccaactgtaatctgtagcaactggcttagttcattaggaaacagcacaaatgaacttaagattctcaatgactgtgtcattctttcttcctgctaagagactcctctgtggccacaaaaggcattctctgtcctacctagctgtcacttctctgtgcagctgatctcaagagcaacaaggcaaagtatttggggcactccccaaaacttgttgctattcctagaaaaaagtgctgtgtatttcctattaaactttacaggatgagaaatactagagggtgtattttcatgtgatctggatctgtctttctggctattagataggtttctccagccatagttacttgagagagtgagtacacagtgcaaggtacagtaaattatgtatttctgtaatttaacaaaataaatactcagtttaggagaatttgaaagacaaaaaaaaaaaaaaaa

SEQ ID NO: 652 - protein, 784 aa, Homo sapiens; identical to SEQ ID NO: 650

SEQ ID NO: 653 - DNA, 3624 bp, Homo sapiens
cccttttgcttacttcctagtcccgggcaggccggctcggaggcagcgagaaagcgcagccaggcggctgctcggcgttctctcaggtgactgctcggagttctcccagtgtttggtgttgcaagcaggatccaaaggagacctatagtgactcccaggagctcttagtgaccaagtgaaggtacctgtggggctcattgtgcccattgctctttcactgctttcaactggtagttgtgggttgaagcactggacaatgccacatactttgtggatggtgtgggtcttgggggtcatcatcagcctctccaaggaagaatcctccaatcaggcttctctgtcttgtgaccgcaatggtatctgcaagggcagctcaggatctttaaactccattccctcagggctcacagaagctgtaaaaagccttgacctgtccaacaacaggatcacctacattagcaacagtgacctacagaggtgtgtgaacctccaggctctggtgctgacatccaatggaattaacacaatagaggaagattctttttcttccctgggcagtcttgaacatttagacttatcctataattacttatctaatttatcgtcttcctggttcaagcccctttcttctttaacattcttaaacttactgggaaatccttacaaaaccctaggggaaacatctcttttttctcatctcacaaaattgcaaatcctgagagtgggaaatatggacaccttcactaagattcaaagaaaagattttgctggacttaccttccttgaggaacttgagattgatgcttcagatctacagagctatgagccaaaaagtttgaagtcaattcagaatgtaagtcatctgatccttcatatgaagcagcatattttactgctggagatttttgtagatgttacaagttccgtggaatgtttggaactgcgagatactgatttggacactttccatttttcagaactatccactggtgaaacaaattcattgattaaaaagtttacatttagaaatgtgaaaatcaccgatgaaagtttgtttcaggttatgaaacttttgaatcagatttctggattgttagaattagagtttgatgactgtacccttaatggagttggtaattttagagcatctgataatgacagagttatagatccaggtaaagtggaaacgttaacaatccggaggctgcatattccaaggttttacttattttatgatctgagcactttatattcacttacagaaagagttaaaagaatcacagtagaaaacagtaaagtttttctggttccttgtttactttcacaacatttaaaatcattagaatacttggatctcagtgaaaatttgatggttgaagaatacttgaaaaattcagcctgtgaggatgcctggccctctctacaaactttaattttaaggcaaaatcatttggcatcattggaaaaaaccggagagactttgctcactctgaaaaacttgactaacattgatatcagtaagaatagttttcattctatgcctgaaacttgtcagtggccagaaaagatgaaatatttgaacttatccagcacacgaatacacagtgtaacaggctgcattcccaagacactggaaattttagatgttagcaacaacaatctcaatttattttctttgaatttgccgcaactcaaagaactttatatttccagaaataagttgatgactctaccagatgcctccctcttacccatgttactagtattgaaaatcagtaggaatgcaataactacgttttctaaggagcaacttgactcatttcacacactgaagactttggaagctggtggcaataacttcatttgctcctgtgaattcctctccttcactcaggagcagcaagcactggccaaagtcttgattgattggccagcaaattacctgtgtgactctccatcccatgtgcgtggccagcaggttcaggatgtccgcctctcggtgtcggaatgtcacaggacagcactggtgtctggcatgtgctgtgctctgttcctgctgatcctgctcacgggggtcctgtgccaccgtttccatggcctgtggtatatgaaaatgatgtgggcctggctccaggccaaaaggaagcccaggaaagctcccagcaggaacatctgctatgatgcatttgtttcttacagtgagcgggatgcctactgggtggagaaccttatggtccaggagctggagaacttcaatccccccttcaagttgtgtcttcataagcgggacttcattcctggcaagtggatcattgacaatatcattgactccattgaaaagagccacaaaactgtctttgtgctttctgaaaactttgtgaagagtgagtggtgcaagtatgaactggacttctcccatttccgtctttttgatgagaacaatgatgctgccattctcattcttctggagcccattgagaaaaaagccattccccagcgcttctgcaagctgcggaagataatgaacaccaagacctacctggagtggcccatggacgaggctcagcgggaaggattttgggtaaatctgagagctgcgataaagtcctaggttcccatatttaagaccagtctttgtctagttgggatctttatgtcactagttatagttaagttcattcagacataattatataaaaactacgtggatgtaccgtcatttgaggacttgcttactaaaactacaaaacttcaaattttgtctggggtgctgttttataaacatatgccagatttaaaaattggtttttggtttttcttttttctatgagataaccatgatcataagtctattactgatatctgaatatagtcccttggtatccaagggaattggttgcaggatcctcgtggatatcaaaattcatagatgatcaagtcccttataagagtggcatagtatttgcatataacctgtgtacattctcctgtatactttaaatcatctctagattacttatgatacccaatacaatgtaaatactatgtaaatagttgtactgtctttttatttatattattattgttattttttattttcaaaatttttaaaacatacttttgatccacagttggttgacttcatggatgcagaacccatggatatagagggccaactgtaatctgtagcaactggcttagttcattaggaaacagcacaaatgaacttaagattctcaatgactgtgtcattctttcttcctgctaagagactcctctgtggccacaaaaggcattctctgtcctacctagctgtcacttctctgtgcagctgatctcaagagcaacaaggcaaagtatttggggcactccccaaaacttgttgctattcctagaaaaaagtgctgtgtatttcctattaaactttacaggatgagaaatactagagggtgtattttcatgtgatctggatctgtctttctggctattagataggtttctccagccatagttacttgagagagtgagtacacagtgcaaggtacagtaaattatgtatttctgtaatttaacaaaataaatactcagtttaggagaatttgaaagacaaaaaaaaaaaaaaaa

SEQ ID NO: 654 - protein, 784 aa, Homo sapiens; identical to SEQ ID NO: 650

SEQ ID NO: 655 - DNA, 3616 bp, Homo sapiens
cccttttgcttacttcctagtcccgggcaggccggctcggaggcagcgagaaagcgcagccaggcggctgctcggcgttctctcagtttctcttttaacagtgtttggtgttgcaagcaggatccaaaggagacctatagtgactcccaggagctcttagtgaccaagtgaaggtacctgtggggctcattgtgcccattgctctttcactgctttcaactggtagttgtgggttgaagcactggacaatgccacatactttgtggatggtgtgggtcttgggggtcatcatcagcctctccaaggaagaatcctccaatcaggcttctctgtcttgtgaccgcaatggtatctgcaagggcagctcaggatctttaaactccattccctcagggctcacagaagctgtaaaaagccttgacctgtccaacaacaggatcacctacattagcaacagtgacctacagaggtgtgtgaacctccaggctctggtgctgacatccaatggaattaacacaatagaggaagattctttttcttccctgggcagtcttgaacatttagacttatcctataattacttatctaatttatcgtcttcctggttcaagcccctttcttctttaacattcttaaacttactgggaaatccttacaaaaccctaggggaaacatctcttttttctcatctcacaaaattgcaaatcctgagagtgggaaatatggacaccttcactaagattcaaagaaaagattttgctggacttaccttccttgaggaacttgagattgatgcttcagatctacagagctatgagccaaaaagtttgaagtcaattcagaatgtaagtcatctgatccttcatatgaagcagcatattttactgctggagatttttgtagatgttacaagttccgtggaatgtttggaactgcgagatactgatttggacactttccatttttcagaactatccactggtgaaacaaattcattgattaaaaagtttacatttagaaatgtgaaaatcaccgatgaaagtttgtttcaggttatgaaacttttgaatcagatttctggattgttagaattagagtttgatgactgtacccttaatggagttggtaattttagagcatctgataatgacagagttatagatccaggtaaagtggaaacgttaacaatccggaggctgcatattccaaggttttacttattttatgatctgagcactttatattcacttacagaaagagttaaaagaatcacagtagaaaacagtaaagtttttctggttccttgtttactttcacaacatttaaaatcattagaatacttggatctcagtgaaaatttgatggttgaagaatacttgaaaaattcagcctgtgaggatgcctggccctctctacaaactttaattttaaggcaaaatcatttggcatcattggaaaaaaccggagagactttgctcactctgaaaaacttgactaacattgatatcagtaagaatagttttcattctatgcctgaaacttgtcagtggccagaaaagatgaaatatttgaacttatccagcacacgaatacacagtgtaacaggctgcattcccaagacactggaaattttagatgttagcaacaacaatctcaatttattttctttgaatttgccgcaactcaaagaactttatatttccagaaataagttgatgactctaccagatgcctccctcttacccatgttactagtattgaaaatcagtaggaatgcaataactacgttttctaaggagcaacttgactcatttcacacactgaagactttggaagctggtggcaataacttcatttgctcctgtgaattcctctccttcactcaggagcagcaagcactggccaaagtcttgattgattggccagcaaattacctgtgtgactctccatcccatgtgcgtggccagcaggttcaggatgtccgcctctcggtgtcggaatgtcacaggacagcactggtgtctggcatgtgctgtgctctgttcctgctgatcctgctcacgggggtcctgtgccaccgtttccatggcctgtggtatatgaaaatgatgtgggcctggctccaggccaaaaggaagcccaggaaagctcccagcaggaacatctgctatgatgcatttgtttcttacagtgagcgggatgcctactgggtggagaaccttatggtccaggagctggagaacttcaatccccccttcaagttgtgtcttcataagcgggacttcattcctggcaagtggatcattgacaatatcattgactccattgaaaagagccacaaaactgtctttgtgctttctgaaaactttgtgaagagtgagtggtgcaagtatgaactggacttctcccatttccgtctttttgatgagaacaatgatgctgccattctcattcttctggagcccattgagaaaaaagccattccccagcgcttctgcaagctgcggaagataatgaacaccaagacctacctggagtggcccatggacgaggctcagcgggaaggattttgggtaaatctgagagctgcgataaagtcctaggttcccatatttaagaccagtctttgtctagttgggatctttatgtcactagttatagttaagttcattcagacataattatataaaaactacgtggatgtaccgtcatttgaggacttgcttactaaaactacaaaacttcaaattttgtctggggtgctgttttataaacatatgccagatttaaaaattggtttttggtttttcttttttctatgagataaccatgatcataagtctattactgatatctgaatatagtcccttggtatccaagggaattggttgcaggatcctcgtggatatcaaaattcatagatgatcaagtcccttataagagtggcatagtatttgcatataacctgtgtacattctcctgtatactttaaatcatctctagattacttatgatacccaatacaatgtaaatactatgtaaatagttgtactgtctttttatttatattattattgttattttttattttcaaaatttttaaaacatacttttgatccacagttggttgacttcatggatgcagaacccatggatatagagggccaactgtaatctgtagcaactggcttagttcattaggaaacagcacaaatgaacttaagattctcaatgactgtgtcattctttcttcctgctaagagactcctctgtggccacaaaaggcattctctgtcctacctagctgtcacttctctgtgcagctgatctcaagagcaacaaggcaaagtatttggggcactccccaaaacttgttgctattcctagaaaaaagtgctgtgtatttcctattaaactttacaggatgagaaatactagagggtgtattttcatgtgatctggatctgtctttctggctattagataggtttctccagccatagttacttgagagagtgagtacacagtgcaaggtacagtaaattatgtatttctgtaatttaacaaaataaatactcagtttaggagaatttgaaagacaaaaaaaaaaaaaaaa

SEQ ID NO: 656 - protein, 784 aa, Homo sapiens; identical to SEQ ID NO: 650

SEQ ID NO: 657 - DNA, 3605 bp, Homo sapiens
cccttttgcttacttcctagtcccgggcaggccggctcggaggcagcgagaaagcgcagccaggcggctgctcggcgttctctcaggtgactgctcggagttctcccaggatccaaaggagacctatagtgactcccaggagctcttagtgaccaagtgaaggtacctgtggggctcattgtgcccattgctctttcactgctttcaactggtagttgtgggttgaagcactggacaatgccacatactttgtggatggtgtgggtcttgggggtcatcatcagcctctccaaggaagaatcctccaatcaggcttctctgtcttgtgaccgcaatggtatctgcaagggcagctcaggatctttaaactccattccctcagggctcacagaagctgtaaaaagccttgacctgtccaacaacaggatcacctacattagcaacagtgacctacagaggtgtgtgaacctccaggctctggtgctgacatccaatggaattaacacaatagaggaagattctttttcttccctgggcagtcttgaacatttagacttatcctataattacttatctaatttatcgtcttcctggttcaagcccctttcttctttaacattcttaaacttactgggaaatccttacaaaaccctaggggaaacatctcttttttctcatctcacaaaattgcaaatcctgagagtgggaaatatggacaccttcactaagattcaaagaaaagattttgctggacttaccttccttgaggaacttgagattgatgcttcagatctacagagctatgagccaaaaagtttgaagtcaattcagaatgtaagtcatctgatccttcatatgaagcagcatattttactgctggagatttttgtagatgttacaagttccgtggaatgtttggaactgcgagatactgatttggacactttccatttttcagaactatccactggtgaaacaaattcattgattaaaaagtttacatttagaaatgtgaaaatcaccgatgaaagtttgtttcaggttatgaaacttttgaatcagatttctggattgttagaattagagtttgatgactgtacccttaatggagttggtaattttagagcatctgataatgacagagttatagatccaggtaaagtggaaacgttaacaatccggaggctgcatattccaaggttttacttattttatgatctgagcactttatattcacttacagaaagagttaaaagaatcacagtagaaaacagtaaagtttttctggttccttgtttactttcacaacatttaaaatcattagaatacttggatctcagtgaaaatttgatggttgaagaatacttgaaaaattcagcctgtgaggatgcctggccctctctacaaactttaattttaaggcaaaatcatttggcatcattggaaaaaaccggagagactttgctcactctgaaaaacttgactaacattgatatcagtaagaatagttttcattctatgcctgaaacttgtcagtggccagaaaagatgaaatatttgaacttatccagcacacgaatacacagtgtaacaggctgcattcccaagacactggaaattttagatgttagcaacaacaatctcaatttattttctttgaatttgccgcaactcaaagaactttatatttccagaaataagttgatgactctaccagatgcctccctcttacccatgttactagtattgaaaatcagtaggaatgcaataactacgttttctaaggagcaacttgactcatttcacacactgaagactttggaagctggtggcaataacttcatttgctcctgtgaattcctctccttcactcaggagcagcaagcactggccaaagtcttgattgattggccagcaaattacctgtgtgactctccatcccatgtgcgtggccagcaggttcaggatgtccgcctctcggtgtcggaatgtcacaggacagcactggtgtctggcatgtgctgtgctctgttcctgctgatcctgctcacgggggtcctgtgccaccgtttccatggcctgtggtatatgaaaatgatgtgggcctggctccaggccaaaaggaagcccaggaaagctcccagcaggaacatctgctatgatgcatttgtttcttacagtgagcgggatgcctactgggtggagaaccttatggtccaggagctggagaacttcaatccccccttcaagttgtgtcttcataagcgggacttcattcctggcaagtggatcattgacaatatcattgactccattgaaaagagccacaaaactgtctttgtgctttctgaaaactttgtgaagagtgagtggtgcaagtatgaactggacttctcccatttccgtctttttgatgagaacaatgatgctgccattctcattcttctggagcccattgagaaaaaagccattccccagcgcttctgcaagctgcggaagataatgaacaccaagacctacctggagtggcccatggacgaggctcagcgggaaggattttgggtaaatctgagagctgcgataaagtcctaggttcccatatttaagaccagtctttgtctagttgggatctttatgtcactagttatagttaagttcattcagacataattatataaaaactacgtggatgtaccgtcatttgaggacttgcttactaaaactacaaaacttcaaattttgtctggggtgctgttttataaacatatgccagatttaaaaattggtttttggtttttcttttttctatgagataaccatgatcataagtctattactgatatctgaatatagtcccttggtatccaagggaattggttgcaggatcctcgtggatatcaaaattcatagatgatcaagtcccttataagagtggcatagtatttgcatataacctgtgtacattctcctgtatactttaaatcatctctagattacttatgatacccaatacaatgtaaatactatgtaaatagttgtactgtctttttatttatattattattgttattttttattttcaaaatttttaaaacatacttttgatccacagttggttgacttcatggatgcagaacccatggatatagagggccaactgtaatctgtagcaactggcttagttcattaggaaacagcacaaatgaacttaagattctcaatgactgtgtcattctttcttcctgctaagagactcctctgtggccacaaaaggcattctctgtcctacctagctgtcacttctctgtgcagctgatctcaagagcaacaaggcaaagtatttggggcactccccaaaacttgttgctattcctagaaaaaagtgctgtgtatttcctattaaactttacaggatgagaaatactagagggtgtattttcatgtgatctggatctgtctttctggctattagataggtttctccagccatagttacttgagagagtgagtacacagtgcaaggtacagtaaattatgtatttctgtaatttaacaaaataaatactcagtttaggagaatttgaaagacaaaaaaaaaaaaaaaa

SEQ ID NO: 658 - protein, 784 aa, Homo sapiens; identical to SEQ ID NO: 650

SEQ ID NO: 659 - DNA, 3601 bp, Homo sapiens
cccttttgcttacttcctagtcccgggcaggccggctcggaggcagcgagaaagcgcagccaggcggctgctcggcgttctctcagtgtttggtgttgcaagcaggatccaaaggagacctatagtgactcccaggagctcttagtgaccaagtgaaggtacctgtggggctcattgtgcccattgctctttcactgctttcaactggtagttgtgggttgaagcactggacaatgccacatactttgtggatggtgtgggtcttgggggtcatcatcagcctctccaaggaagaatcctccaatcaggcttctctgtcttgtgaccgcaatggtatctgcaagggcagctcaggatctttaaactccattccctcagggctcacagaagctgtaaaaagccttgacctgtccaacaacaggatcacctacattagcaacagtgacctacagaggtgtgtgaacctccaggctctggtgctgacatccaatggaattaacacaatagaggaagattctttttcttccctgggcagtcttgaacatttagacttatcctataattacttatctaatttatcgtcttcctggttcaagcccctttcttctttaacattcttaaacttactgggaaatccttacaaaaccctaggggaaacatctcttttttctcatctcacaaaattgcaaatcctgagagtgggaaatatggacaccttcactaagattcaaagaaaagattttgctggacttaccttccttgaggaacttgagattgatgcttcagatctacagagctatgagccaaaaagtttgaagtcaattcagaatgtaagtcatctgatccttcatatgaagcagcatattttactgctggagatttttgtagatgttacaagttccgtggaatgtttggaactgcgagatactgatttggacactttccatttttcagaactatccactggtgaaacaaattcattgattaaaaagtttacatttagaaatgtgaaaatcaccgatgaaagtttgtttcaggttatgaaacttttgaatcagatttctggattgttagaattagagtttgatgactgtacccttaatggagttggtaattttagagcatctgataatgacagagttatagatccaggtaaagtggaaacgttaacaatccggaggctgcatattccaaggttttacttattttatgatctgagcactttatattcacttacagaaagagttaaaagaatcacagtagaaaacagtaaagtttttctggttccttgtttactttcacaacatttaaaatcattagaatacttggatctcagtgaaaatttgatggttgaagaatacttgaaaaattcagcctgtgaggatgcctggccctctctacaaactttaattttaaggcaaaatcatttggcatcattggaaaaaaccggagagactttgctcactctgaaaaacttgactaacattgatatcagtaagaatagttttcattctatgcctgaaacttgtcagtggccagaaaagatgaaatatttgaacttatccagcacacgaatacacagtgtaacaggctgcattcccaagacactggaaattttagatgttagcaacaacaatctcaatttattttctttgaatttgccgcaactcaaagaactttatatttccagaaataagttgatgactctaccagatgcctccctcttacccatgttactagtattgaaaatcagtaggaatgcaataactacgttttctaaggagcaacttgactcatttcacacactgaagactttggaagctggtggcaataacttcatttgctcctgtgaattcctctccttcactcaggagcagcaagcactggccaaagtcttgattgattggccagcaaattacctgtgtgactctccatcccatgtgcgtggccagcaggttcaggatgtccgcctctcggtgtcggaatgtcacaggacagcactggtgtctggcatgtgctgtgctctgttcctgctgatcctgctcacgggggtcctgtgccaccgtttccatggcctgtggtatatgaaaatgatgtgggcctggctccaggccaaaaggaagcccaggaaagctcccagcaggaacatctgctatgatgcatttgtttcttacagtgagcgggatgcctactgggtggagaaccttatggtccaggagctggagaacttcaatccccccttcaagttgtgtcttcataagcgggacttcattcctggcaagtggatcattgacaatatcattgactccattgaaaagagccacaaaactgtctttgtgctttctgaaaactttgtgaagagtgagtggtgcaagtatgaactggacttctcccatttccgtctttttgatgagaacaatgatgctgccattctcattcttctggagcccattgagaaaaaagccattccccagcgcttctgcaagctgcggaagataatgaacaccaagacctacctggagtggcccatggacgaggctcagcgggaaggattttgggtaaatctgagagctgcgataaagtcctaggttcccatatttaagaccagtctttgtctagttgggatctttatgtcactagttatagttaagttcattcagacataattatataaaaactacgtggatgtaccgtcatttgaggacttgcttactaaaactacaaaacttcaaattttgtctggggtgctgttttataaacatatgccagatttaaaaattggtttttggtttttcttttttctatgagataaccatgatcataagtctattactgatatctgaatatagtcccttggtatccaagggaattggttgcaggatcctcgtggatatcaaaattcatagatgatcaagtcccttataagagtggcatagtatttgcatataacctgtgtacattctcctgtatactttaaatcatctctagattacttatgatacccaatacaatgtaaatactatgtaaatagttgtactgtctttttatttatattattattgttattttttattttcaaaatttttaaaacatacttttgatccacagttggttgacttcatggatgcagaacccatggatatagagggccaactgtaatctgtagcaactggcttagttcattaggaaacagcacaaatgaacttaagattctcaatgactgtgtcattctttcttcctgctaagagactcctctgtggccacaaaaggcattctctgtcctacctagctgtcacttctctgtgcagctgatctcaagagcaacaaggcaaagtatttggggcactccccaaaacttgttgctattcctagaaaaaagtgctgtgtatttcctattaaactttacaggatgagaaatactagagggtgtattttcatgtgatctggatctgtctttctggctattagataggtttctccagccatagttacttgagagagtgagtacacagtgcaaggtacagtaaattatgtatttctgtaatttaacaaaataaatactcagtttaggagaatttgaaagacaaaaaaaaaaaaaaaa

SEQ ID NO: 660 - protein, 784 aa, Homo sapiens; identical to SEQ ID NO: 650

SEQ ID NO: 661 - DNA, 3580 bp, Homo sapiens
cccttttgcttacttcctagtcccgggcaggccggctcggaggcagcgagaaagcgcagccaggcggctgctcggcgttctctcaggtgactgctcggagttctcccagtttctcttttaacagtgtttggtgttgcaagcaggatccaaaggagacctatagtgactcccaggagctcttagtgaccaagtgaaggttgaagcactggacaatgccacatactttgtggatggtgtgggtcttgggggtcatcatcagcctctccaaggaagaatcctccaatcaggcttctctgtcttgtgaccgcaatggtatctgcaagggcagctcaggatctttaaactccattccctcagggctcacagaagctgtaaaaagccttgacctgtccaacaacaggatcacctacattagcaacagtgacctacagaggtgtgtgaacctccaggctctggtgctgacatccaatggaattaacacaatagaggaagattctttttcttccctgggcagtcttgaacatttagacttatcctataattacttatctaatttatcgtcttcctggttcaagcccctttcttctttaacattcttaaacttactgggaaatccttacaaaaccctaggggaaacatctcttttttctcatctcacaaaattgcaaatcctgagagtgggaaatatggacaccttcactaagattcaaagaaaagattttgctggacttaccttccttgaggaacttgagattgatgcttcagatctacagagctatgagccaaaaagtttgaagtcaattcagaatgtaagtcatctgatccttcatatgaagcagcatattttactgctggagatttttgtagatgttacaagttccgtggaatgtttggaactgcgagatactgatttggacactttccatttttcagaactatccactggtgaaacaaattcattgattaaaaagtttacatttagaaatgtgaaaatcaccgatgaaagtttgtttcaggttatgaaacttttgaatcagatttctggattgttagaattagagtttgatgactgtacccttaatggagttggtaattttagagcatctgataatgacagagttatagatccaggtaaagtggaaacgttaacaatccggaggctgcatattccaaggttttacttattttatgatctgagcactttatattcacttacagaaagagttaaaagaatcacagtagaaaacagtaaagtttttctggttccttgtttactttcacaacatttaaaatcattagaatacttggatctcagtgaaaatttgatggttgaagaatacttgaaaaattcagcctgtgaggatgcctggccctctctacaaactttaattttaaggcaaaatcatttggcatcattggaaaaaaccggagagactttgctcactctgaaaaacttgactaacattgatatcagtaagaatagttttcattctatgcctgaaacttgtcagtggccagaaaagatgaaatatttgaacttatccagcacacgaatacacagtgtaacaggctgcattcccaagacactggaaattttagatgttagcaacaacaatctcaatttattttctttgaatttgccgcaactcaaagaactttatatttccagaaataagttgatgactctaccagatgcctccctcttacccatgttactagtattgaaaatcagtaggaatgcaataactacgttttctaaggagcaacttgactcatttcacacactgaagactttggaagctggtggcaataacttcatttgctcctgtgaattcctctccttcactcaggagcagcaagcactggccaaagtcttgattgattggccagcaaattacctgtgtgactctccatcccatgtgcgtggccagcaggttcaggatgtccgcctctcggtgtcggaatgtcacaggacagcactggtgtctggcatgtgctgtgctctgttcctgctgatcctgctcacgggggtcctgtgccaccgtttccatggcctgtggtatatgaaaatgatgtgggcctggctccaggccaaaaggaagcccaggaaagctcccagcaggaacatctgctatgatgcatttgtttcttacagtgagcgggatgcctactgggtggagaaccttatggtccaggagctggagaacttcaatccccccttcaagttgtgtcttcataagcgggacttcattcctggcaagtggatcattgacaatatcattgactccattgaaaagagccacaaaactgtctttgtgctttctgaaaactttgtgaagagtgagtggtgcaagtatgaactggacttctcccatttccgtctttttgatgagaacaatgatgctgccattctcattcttctggagcccattgagaaaaaagccattccccagcgcttctgcaagctgcggaagataatgaacaccaagacctacctggagtggcccatggacgaggctcagcgggaaggattttgggtaaatctgagagctgcgataaagtcctaggttcccatatttaagaccagtctttgtctagttgggatctttatgtcactagttatagttaagttcattcagacataattatataaaaactacgtggatgtaccgtcatttgaggacttgcttactaaaactacaaaacttcaaattttgtctggggtgctgttttataaacatatgccagatttaaaaattggtttttggtttttcttttttctatgagataaccatgatcataagtctattactgatatctgaatatagtcccttggtatccaagggaattggttgcaggatcctcgtggatatcaaaattcatagatgatcaagtcccttataagagtggcatagtatttgcatataacctgtgtacattctcctgtatactttaaatcatctctagattacttatgatacccaatacaatgtaaatactatgtaaatagttgtactgtctttttatttatattattattgttattttttattttcaaaatttttaaaacatacttttgatccacagttggttgacttcatggatgcagaacccatggatatagagggccaactgtaatctgtagcaactggcttagttcattaggaaacagcacaaatgaacttaagattctcaatgactgtgtcattctttcttcctgctaagagactcctctgtggccacaaaaggcattctctgtcctacctagctgtcacttctctgtgcagctgatctcaagagcaacaaggcaaagtatttggggcactccccaaaacttgttgctattcctagaaaaaagtgctgtgtatttcctattaaactttacaggatgagaaatactagagggtgtattttcatgtgatctggatctgtctttctggctattagataggtttctccagccatagttacttgagagagtgagtacacagtgcaaggtacagtaaattatgtatttctgtaatttaacaaaataaatactcagtttaggagaatttgaaagacaaaaaaaaaaaaaaaa

SEQ ID NO: 662 - protein, 784 aa, Homo sapiens; identical to SEQ ID NO: 650

SEQ ID NO: 663 - DNA, 3565 bp, Homo sapiens
cccttttgcttacttcctagtcccgggcaggccggctcggaggcagcgagaaagcgcagccaggcggctgctcggcgttctctcaggtgactgctcggagttctcccagtgtttggtgttgcaagcaggatccaaaggagacctatagtgactcccaggagctcttagtgaccaagtgaaggttgaagcactggacaatgccacatactttgtggatggtgtgggtcttgggggtcatcatcagcctctccaaggaagaatcctccaatcaggcttctctgtcttgtgaccgcaatggtatctgcaagggcagctcaggatctttaaactccattccctcagggctcacagaagctgtaaaaagccttgacctgtccaacaacaggatcacctacattagcaacagtgacctacagaggtgtgtgaacctccaggctctggtgctgacatccaatggaattaacacaatagaggaagattctttttcttccctgggcagtcttgaacatttagacttatcctataattacttatctaatttatcgtcttcctggttcaagcccctttcttctttaacattcttaaacttactgggaaatccttacaaaaccctaggggaaacatctcttttttctcatctcacaaaattgcaaatcctgagagtgggaaatatggacaccttcactaagattcaaagaaaagattttgctggacttaccttccttgaggaacttgagattgatgcttcagatctacagagctatgagccaaaaagtttgaagtcaattcagaatgtaagtcatctgatccttcatatgaagcagcatattttactgctggagatttttgtagatgttacaagttccgtggaatgtttggaactgcgagatactgatttggacactttccatttttcagaactatccactggtgaaacaaattcattgattaaaaagtttacatttagaaatgtgaaaatcaccgatgaaagtttgtttcaggttatgaaacttttgaatcagatttctggattgttagaattagagtttgatgactgtacccttaatggagttggtaattttagagcatctgataatgacagagttatagatccaggtaaagtggaaacgttaacaatccggaggctgcatattccaaggttttacttattttatgatctgagcactttatattcacttacagaaagagttaaaagaatcacagtagaaaacagtaaagtttttctggttccttgtttactttcacaacatttaaaatcattagaatacttggatctcagtgaaaatttgatggttgaagaatacttgaaaaattcagcctgtgaggatgcctggccctctctacaaactttaattttaaggcaaaatcatttggcatcattggaaaaaaccggagagactttgctcactctgaaaaacttgactaacattgatatcagtaagaatagttttcattctatgcctgaaacttgtcagtggccagaaaagatgaaatatttgaacttatccagcacacgaatacacagtgtaacaggctgcattcccaagacactggaaattttagatgttagcaacaacaatctcaatttattttctttgaatttgccgcaactcaaagaactttatatttccagaaataagttgatgactctaccagatgcctccctcttacccatgttactagtattgaaaatcagtaggaatgcaataactacgttttctaaggagcaacttgactcatttcacacactgaagactttggaagctggtggcaataacttcatttgctcctgtgaattcctctccttcactcaggagcagcaagcactggccaaagtcttgattgattggccagcaaattacctgtgtgactctccatcccatgtgcgtggccagcaggttcaggatgtccgcctctcggtgtcggaatgtcacaggacagcactggtgtctggcatgtgctgtgctctgttcctgctgatcctgctcacgggggtcctgtgccaccgtttccatggcctgtggtatatgaaaatgatgtgggcctggctccaggccaaaaggaagcccaggaaagctcccagcaggaacatctgctatgatgcatttgtttcttacagtgagcgggatgcctactgggtggagaaccttatggtccaggagctggagaacttcaatccccccttcaagttgtgtcttcataagcgggacttcattcctggcaagtggatcattgacaatatcattgactccattgaaaagagccacaaaactgtctttgtgctttctgaaaactttgtgaagagtgagtggtgcaagtatgaactggacttctcccatttccgtctttttgatgagaacaatgatgctgccattctcattcttctggagcccattgagaaaaaagccattccccagcgcttctgcaagctgcggaagataatgaacaccaagacctacctggagtggcccatggacgaggctcagcgggaaggattttgggtaaatctgagagctgcgataaagtcctaggttcccatatttaagaccagtctttgtctagttgggatctttatgtcactagttatagttaagttcattcagacataattatataaaaactacgtggatgtaccgtcatttgaggacttgcttactaaaactacaaaacttcaaattttgtctggggtgctgttttataaacatatgccagatttaaaaattggtttttggtttttcttttttctatgagataaccatgatcataagtctattactgatatctgaatatagtcccttggtatccaagggaattggttgcaggatcctcgtggatatcaaaattcatagatgatcaagtcccttataagagtggcatagtatttgcatataacctgtgtacattctcctgtatactttaaatcatctctagattacttatgatacccaatacaatgtaaatactatgtaaatagttgtactgtctttttatttatattattattgttattttttattttcaaaatttttaaaacatacttttgatccacagttggttgacttcatggatgcagaacccatggatatagagggccaactgtaatctgtagcaactggcttagttcattaggaaacagcacaaatgaacttaagattctcaatgactgtgtcattctttcttcctgctaagagactcctctgtggccacaaaaggcattctctgtcctacctagctgtcacttctctgtgcagctgatctcaagagcaacaaggcaaagtatttggggcactccccaaaacttgttgctattcctagaaaaaagtgctgtgtatttcctattaaactttacaggatgagaaatactagagggtgtattttcatgtgatctggatctgtctttctggctattagataggtttctccagccatagttacttgagagagtgagtacacagtgcaaggtacagtaaattatgtatttctgtaatttaacaaaataaatactcagtttaggagaatttgaaagacaaaaaaaaaaaaaaaa

SEQ ID NO: 664 - protein, 784 aa, Homo sapiens; identical to SEQ ID NO: 650

SEQ ID NO: 665 - DNA, 6063 bp, Homo sapiens
aatccctccctccggcgggcgtcgctggcgggtggctaggcccaacggcaggaagccgacgctatcctccgttccgcggcgccgggtccgccttccgtctgttctagggcctgctcctgcgcggcagctgctttagaaggtctcgagcctcctgtaccttcccagggatgaaccgggccttccctctggaaggcgagggttcgggccacagtgagcgagggccagggcggtgggcgcgcgcagagggaaaccggatcagttgagagagaatcaagagtagcggatgaggcgcttgtggggcgcggcccggaagccctcgggcgcgggctgggagaaggagtgggcggaggcgccgcaggaggctcccggggcctggtcgggccggctgggccccgggcgcagtggaagaaagggacgggcggtgcccggttgggcgtcctggccagctcaccttgccctggcggctcgccccgcccggcacttgggaggagcagggcagggcccgcggcctttgcattctgggaccgcccccttccattcccgggccagcggcgagcggcagcgacggctggagccgcagctacagcatgagagccggtgccgctcctccacgcctgcggacgcgtggcgagcggaggcagcgctgcctgttcgcgccatgggggcaccgtggggctcgccgacggcggcggcgggcgggcggcgcgggtggcgccgaggccgggggctgccatggaccgtctgtgtgctggcggccgccggcttgacgtgtacggcgctgatcacctacgcttgctgggggcagctgccgccgctgccctgggcgtcgccaaccccgtcgcgaccggtgggcgtgctgctgtggtgggagcccttcggggggcgcgatagcgccccgaggccgccccctgactgccggctgcgcttcaacatcagcggctgccgcctgctcaccgaccgcgcgtcctacggagaggctcaggccgtgcttttccaccaccgcgacctcgtgaaggggccccccgactggcccccgccctggggcatccaggcgcacactgccgaggaggtggatctgcgcgtgttggactacgaggaggcagcggcggcggcagaagccctggcgacctccagccccaggcccccgggccagcgctgggtttggatgaacttcgagtcgccctcgcactccccggggctgcgaagcctggcaagtaacctcttcaactggacgctctcctaccgggcggactcggacgtctttgtgccttatggctacctctaccccagaagccaccccggcgacccgccctcaggcctggccccgccactgtccaggaaacaggggctggtggcatgggtggtgagccactgggacgagcgccaggcccgggtccgctactaccaccaactgagccaacatgtgaccgtggacgtgttcggccggggcgggccggggcagccggtgcccgaaattgggctcctgcacacagtggcccgctacaagttctacctggctttcgagaactcgcagcacctggattatatcaccgagaagctctggcgcaacgcgttgctcgctggggcggtgccggtggtgctgggcccagaccgtgccaactacgagcgctttgtgccccgcggcgccttcatccacgtggacgacttcccaagtgcctcctccctggcctcgtacctgcttttcctcgaccgcaaccccgcggtctatcgccgctacttccactggcgccggagctacgctgtccacatcacctccttctgggacgagccttggtgccgggtgtgccaggctgtacagagggctggggaccggcccaagagcatacggaacttggccagctggttcgagcggtgaagccgcgctcccctggaagcgacccaggggaggccaagttgtcagctttttgatcctctactgtgcatctccttgactgccgcatcatgggagtaagttcttcaaacacccatttttgctctatgggaaaaaaacgatttaccaattaatattactcagcacagagatgggggcccggtttccatattttttgcacagctagcaattgggctccctttgctgctgatgggcatcattgtttaggggtgaaggagggggttcttcctcaccttgtaaccagtgcagaaatgaaatagcttagcggcaagaagccgttgaggcggtttcctgaatttccccatctgccacaggccatatttgtggcccgtgcagcttccaaatctcatacacaactgttcccgattcacgtttttctggaccaaggtgaagcaaatttgtggttgtagaaggagccttgttggtggagagtggaaggactgtggctgcaggtgggactttgttgtttggattcctcacagccttggctcctgagaaaggtgaggagggcagtccaagaggggccgctgacttctttcacaagtactatctgttcccctgtcctgtgaatggaagcaaagtgctggattgtccttggaggaaacttaagatgaatacatgcgtgtacctcactttacataagaaatgtattcctgaaaagctgcatttaaatcaagtcccaaattcattgacttaggggagttcagtatttaatgaaaccctatggagaatttatccctttacaatgtgaatagtcatctcctaatttgtttcttctgtctttatgtttttctataacctggattttttaaatcatattaaaattacagatgtgaaaataaagcagaagcaacctttttccctcttcccagaaaaccagtctgtgtttacagacagaagagaaggaagccatagtgtcacttccacacaattatttatttcatgtctttactggacctgaaatttaaactgcaatgccagtcctgcaggagtgctggcattaccctctgcagaacagtgaaaggtattgcactacattatggaatcatgcaaaaggaaaaaaagtttcatgatatctgttgttggcagtttttgtttatctctgacagtttttagttaaatgtttagatcctcagaactacattagtgcctactattaacttactctgtctcttgttaaaggctaaatctgcgcttctccctggtgccagcaggttcccctcacagtcaatgcagtggtatagcatatcctcacatttctagtgcccttgagactgtgctatggaaccaatcttgaacatacatgcattgacttgacaagttactgagtaagcagcatattcagcaggtgccactacatgcctactctgccagacactgagcttggggccctagggaagatagagaattatacaaggcaaagtccttctctttagggctcttacaatctatcacttccaaaaagtaaatggtgactgataaaacaattggcagaacctgtttgattactgtgacagtcttaatgataccataaatcaatattagaaagctagttgacttaaagcctgaaataatgggagttttctcctccacttattagaataaggaccctcagtgactaattattgtgggtagggtcaagattaactagttttatacagagttctgctgtaaatagtcattttgcatttgattagtgcagttctctgaatcataaagcaagttttacctctctgtacatgtttttgcagacatacttgaaaagctcacttaaatctaggtgcttcaattcactttcttgagaggacaaatgaaaagctgtggagaaaatgtcctcattaaagtattaaagtgtgggcagaattacaattacaaagtgccagccaccgaataaagataaaagttcagttcttaaaatgagtttttatgagataacagtcagtgatcttggtgttaccgggattccacatggggcagtgggaaagagttcaggttttgaaggtaacctagtttagatttgaattccagctatgtgacattgggtaaattagtagtagtcctgagcctcagcgtcctcatctataaaatgactggcgaaaatacttcacaagctcattttgagcactttaggaagtaagtgaaagtacctaaaatagcaggcacccaattgatgattttatatcttccttctttgcttgcagtgatttcaggatgtcctcatatctatttataggtctaaaattatatcttaaggtatgttgtagaataaattaaaaggataatctaaatcaccatttagattaagcttgacttgcaaactaggaagaagcacctaggctttctttgaaaatatttttttggttcgttttggtaaagctctataaattggtatctattattttaccaatttttttttagtattaagtccatttagaactaaccatattatttatggaataattagcatgaggaaggtataattgcatttttttttttttgagacggagtcttgcactgtagccccagctggactgcagtggcgtgatcttggctcactgcaacctccgcctcccaggttcaagcgattctcctgcctcagcctcccgagcagctgagactacaggcgcctgccaccacgcctggccaattttttgtatttttagtagagactgcgtttcaccatgttgggcaggctggtcttgaactcctgaccttgtgatccacctgcctcggcctctcagagagctgggattacaggtgtgagccgccgtgcccagccattgcatttttattcacatacacattgttaatgtggaacaatttaacactaatctcatcagagagcgagatgaatgtggcaattgctcattttattttgcatatattaaattgagtaggttcagctctaacataccttaagaaaaatgcatatcggtgcactgtatgtatttcaaaatgcctttcctatgattgtcatgtcctcctttaaggcttttccctcaaatttattacaaatttagtatttttagtacttgatgactctaattacatgaatgcacctggaatgacatttgtaacagaagacggtctgacttgctttcagtattcacaagttctttccagtttccaagtcttttcctagcagtaatttaggggagacagaggagtttcatgtaaagagcatgcagtttggagtcagaacctgggtatgactctgtggccttgatgaagcaagttacttaaactcttgagttttagctttctcctttacaatgcatgaatgcctatccccctacaaaacaaagattaaatgtgatgatgtatgccaaggtgctttgtatattgtaaagtgctatataattataagatgttctaaattttcaaggatctaaaccagggattggcaaacgtttttccagggagtaaatattttacgctttgcatatataatttatggaggtgttgagaggatagattagacacttgaagtactcaggatagtgcctggcatgtaggaagcacctggaaaatattcgctgtgattaccatcagtccattttaccgaggaaggagccaaggtccaggcccactgaaggacttgcataacattacaatagcagtggcagaaccagccatgcttctgcaaatcacaacctctttgagcctctgtcacctgaactgcaaaatgagtgggttagacaaaatcatctgttgggacctcctagttccacgtgctatcattctactaactggcaccctaaggttgaaagtgcttatctgctttccaatgtggcttccttacagtctggaactgacaatatgcaggagcagtaaactggcagaaaaccaggaatcagagaaagaaaatataatttaactttaaagatgtaaattatatatatagtatattatatatatttttaaagctttatatgcctcaaatatcagggaaaggagccaagtccttggtatttagtttggtgaatacttgcattgaatacatgtcaagatgtcaagtcatttttgaatgtgtctcagggatttctatgctacacattcttttaacaaatcaagtatttatgtacacatgttcagattttttgacaaaatgattaaaataatgagatggaaaatgaaaaaaaaaaaaaaaa

SEQ ID NO: 666 - protein, 530 aa, Homo sapiens
MRRLWGAARKPSGAGWEKEWAEAPQEAPGAWSGRLGPGRSGRKGRAVPGWASWPAHLALAARPARHLGGAGQGPRPLHSGTAPFHSRASGERQRRLEPQLQHESRCRSSTPADAWRAEAALPVRAMGAPWGSPTAAAGGRRGWRRGRGLPWTVCVLAAAGLTCTALITYACWGQLPPLPWASPTPSRPVGVLLWWEPFGGRDSAPRPPPDCRLRFNISGCRLLTDRASYGEAQAVLFHHRDLVKGPPDWPPPWGIQAHTAEEVDLRVLDYEEAAAAAEALATSSPRPPGQRWVWMNFESPSHSPGLRSLASNLFNWTLSYRADSDVFVPYGYLYPRSHPGDPPSGLAPPLSRKQGLVAWVVSHWDERQARVRYYHQLSQHVTVDVFGRGGPGQPVPEIGLLHTVARYKFYLAFENSQHLDYITEKLWRNALLAGAVPVVLGPDRANYERFVPRGAFIHVDDFPSASSLASYLLFLDRNPAVYRRYFHWRRSYAVHITSFWDEPWCRVCQAVQRAGDRPKSIRNLASWFER

SEQ ID NO: 667 - DNA, 919 bp, Homo sapiens
tcgtgacaaagcaaattgtctggtatcatgaatttggaacaccattccagaccaaaattgaaaaaatggttgacctcacccaggtaatggatgatgaagtattcatggcttttgcatcctatgcaacaattattctttcaaaaatgatgcttatgagtactgcaactgcattctatagattgacaagaaaggtttttgccaatccagaagactgtgtagcatttggcaaaggagaaaatgccaagaagtatcttcgaacagatgacagagtagaacgtgtacgcagagcccacctgaatgaccttgaaaatattattccatttcttggaattggcctcctgtattccttgagtggtcccgacccctctacagccatcctgcacttcagactatttgtcggagcacggatctaccacaccattgcatatttgacaccccttccccagccaaatagagctttgagtttttttgttggatatggagttactctttccatggcttacaggttgctgaaaagtaaattgtacctgtaaagaaaatcatacaactcagcatccagttggctttttaagaattctgtacttccaatttataatgaatactttcttagattttaggtaggaggggagcagaggaattatgaactggggtaaacccattttgaatattagcattgccaatatcctgtattcttgttttacatttggattagaaatttaacatagtaattcttaagtcttttgtctgatttttaaagtactttcttataaatttggatcatgttatgatttgtaacattcacacaacacctcacttttgaatctataaaagaattgcacgtatgagaaacctatatttcaatactgctgaaacagacatgaaataaagaatttaaagaatgaaaaaaaaaaaaaaaaaa

SEQ ID NO: 668 - protein, 155 aa, Homo sapiens
MVDLTQVMDDEVFMAFASYATIILSKMMLMSTATAFYRLTRKVFANPEDCVAFGKGENAKKYLRTDDRVERVRRAHLNDLENIIPFLGIGLLYSLSGPDPSTAILHFRLFVGARIYHTIAYLTPLPQPNRALSFFVGYGVTLSMAYRLLKSKLYL

SEQ ID NO: 669 - DNA, 944 bp, Homo sapiens
acagtccctgcattgcgcgcgacccggcggcgggacaggcttgctgcttcctcctcctcggcctcaccattccagaccaaaattgaaaaaatggttgacctcacccaggtaatggatgatgaagtattcatggcttttgcatcctatgcaacaattattctttcaaaaatgatgcttatgagtactgcaactgcattctatagattgacaagaaaggtttttgccaatccagaagactgtgtagcatttggcaaaggagaaaatgccaagaagtatcttcgaacagatgacagagtagaacgtgtacgcagagcccacctgaatgaccttgaaaatattattccatttcttggaattggcctcctgtattccttgagtggtcccgacccctctacagccatcctgcacttcagactatttgtcggagcacggatctaccacaccattgcatatttgacaccccttccccagccaaatagagctttgagtttttttgttggatatggagttactctttccatggcttacaggttgctgaaaagtaaattgtacctgtaaagaaaatcatacaactcagcatccagttggctttttaagaattctgtacttccaatttataatgaatactttcttagattttaggtaggaggggagcagaggaattatgaactggggtaaacccattttgaatattagcattgccaatatcctgtattcttgttttacatttggattagaaatttaacatagtaattcttaagtcttttgtctgatttttaaagtactttcttataaatttggatcatgttatgatttgtaacattcacacaacacctcacttttgaatctataaaagaattgcacgtatgagaaacctatatttcaatactgctgaaacagacatgaaataaagaatttaaagaatgaaaaaaaaaaaaaaaaaa

SEQ ID NO: 670 - protein, 155 aa, Homo sapiens; identical to SEQ ID NO: 668

SEQ ID NO: 671 - DNA, 997 bp, Homo sapiens
ggcagatggaagacttgggggggtctctgccagctggaagtgcttggctccacttagcagctaaacttagcttttcaatcgatcgcttttgaaagggaattgtatttctgtccccgtgcggattccagaccaaaattgaaaaaatggttgacctcacccaggtaatggatgatgaagtattcatggcttttgcatcctatgcaacaattattctttcaaaaatgatgcttatgagtactgcaactgcattctatagattgacaagaaaggtttttgccaatccagaagactgtgtagcatttggcaaaggagaaaatgccaagaagtatcttcgaacagatgacagagtagaacgtgtacgcagagcccacctgaatgaccttgaaaatattattccatttcttggaattggcctcctgtattccttgagtggtcccgacccctctacagccatcctgcacttcagactatttgtcggagcacggatctaccacaccattgcatatttgacaccccttccccagccaaatagagctttgagtttttttgttggatatggagttactctttccatggcttacaggttgctgaaaagtaaattgtacctgtaaagaaaatcatacaactcagcatccagttggctttttaagaattctgtacttccaatttataatgaatactttcttagattttaggtaggaggggagcagaggaattatgaactggggtaaacccattttgaatattagcattgccaatatcctgtattcttgttttacatttggattagaaatttaacatagtaattcttaagtcttttgtctgatttttaaagtactttcttataaatttggatcatgttatgatttgtaacattcacacaacacctcacttttgaatctataaaagaattgcacgtatgagaaacctatatttcaatactgctgaaacagacatgaaataaagaatttaaagaatgaaaaaaaaaaaaaaaaaa

SEQ ID NO: 672 - protein, 155 aa, Homo sapiens; identical to SEQ ID NO: 668

SEQ ID NO: 673 - DNA, 927 bp, Homo sapiens
gaattcaagtcctaaagcctacagttttgaatactactgaaatgacaagttattccagaccaaaattgaaaaaatggttgacctcacccaggtaatggatgatgaagtattcatggcttttgcatcctatgcaacaattattctttcaaaaatgatgcttatgagtactgcaactgcattctatagattgacaagaaaggtttttgccaatccagaagactgtgtagcatttggcaaaggagaaaatgccaagaagtatcttcgaacagatgacagagtagaacgtgtacgcagagcccacctgaatgaccttgaaaatattattccatttcttggaattggcctcctgtattccttgagtggtcccgacccctctacagccatcctgcacttcagactatttgtcggagcacggatctaccacaccattgcatatttgacaccccttccccagccaaatagagctttgagtttttttgttggatatggagttactctttccatggcttacaggttgctgaaaagtaaattgtacctgtaaagaaaatcatacaactcagcatccagttggctttttaagaattctgtacttccaatttataatgaatactttcttagattttaggtaggaggggagcagaggaattatgaactggggtaaacccattttgaatattagcattgccaatatcctgtattcttgttttacatttggattagaaatttaacatagtaattcttaagtcttttgtctgatttttaaagtactttcttataaatttggatcatgttatgatttgtaacattcacacaacacctcacttttgaatctataaaagaattgcacgtatgagaaacctatatttcaatactgctgaaacagacatgaaataaagaatttaaagaatgaaaaaaaaaaaaaaaaaa

SEQ ID NO: 674 - protein, 155 aa, Homo sapiens; identical to SEQ ID NO: 668

SEQ ID NO: 675 - DNA, 937 bp, Homo sapiens
acagtccctgcattgcgcgcgacccggcggcgggacaggcttgctgcttcctcctcctcggcctcaccaccaaaattgaaaaaatggttgacctcacccaggtaatggatgatgaagtattcatggcttttgcatcctatgcaacaattattctttcaaaaatgatgcttatgagtactgcaactgcattctatagattgacaagaaaggtttttgccaatccagaagactgtgtagcatttggcaaaggagaaaatgccaagaagtatcttcgaacagatgacagagtagaacgtgtacgcagagcccacctgaatgaccttgaaaatattattccatttcttggaattggcctcctgtattccttgagtggtcccgacccctctacagccatcctgcacttcagactatttgtcggagcacggatctaccacaccattgcatatttgacaccccttccccagccaaatagagctttgagtttttttgttggatatggagttactctttccatggcttacaggttgctgaaaagtaaattgtacctgtaaagaaaatcatacaactcagcatccagttggctttttaagaattctgtacttccaatttataatgaatactttcttagattttaggtaggaggggagcagaggaattatgaactggggtaaacccattttgaatattagcattgccaatatcctgtattcttgttttacatttggattagaaatttaacatagtaattcttaagtcttttgtctgatttttaaagtactttcttataaatttggatcatgttatgatttgtaacattcacacaacacctcacttttgaatctataaaagaattgcacgtatgagaaacctatatttcaatactgctgaaacagacatgaaataaagaatttaaagaatgaaaaaaaaaaaaaaaaaa

SEQ ID NO: 676 - protein, 155 aa, Homo sapiens; identical to SEQ ID NO: 668

SEQ ID NO: 677 - DNA, 1088 bp, Homo sapiens
acagtccctgcattgcgcgcgacccggcggcgggacaggcttgctgcttcctcctcctcggcctcaccattccagaccaaaattgaaaaaatggttgacctcacccaggtaatggatgatgaagtattcatggcttttgcatcctatgcaacaattattctttcaaaaatgatgcttatgagtactgcaactgcattctatagattgacaagaaaggtttttgccaatccagaagactgtgtagcatttggcaaaggagaaaatgccaagaagtatcttcgaacagatgacagagtagaacgtgtacgcagtcattgtaaagctgttacgattagcatatttgaacggcagagccagaatggggctacaaatgaagtgaaaagtatgctttaccgtgtgcaacaattgtgaaagttaatacatacacatatggaacaattaactaaaaacttaagagcccacctgaatgaccttgaaaatattattccatttcttggaattggcctcctgtattccttgagtggtcccgacccctctacagccatcctgcacttcagactatttgtcggagcacggatctaccacaccattgcatatttgacaccccttccccagccaaatagagctttgagtttttttgttggatatggagttactctttccatggcttacaggttgctgaaaagtaaattgtacctgtaaagaaaatcatacaactcagcatccagttggctttttaagaattctgtacttccaatttataatgaatactttcttagattttaggtaggaggggagcagaggaattatgaactggggtaaacccattttgaatattagcattgccaatatcctgtattcttgttttacatttggattagaaatttaacatagtaattcttaagtcttttgtctgatttttaaagtactttcttataaatttggatcatgttatgatttgtaacattcacacaacacctcacttttgaatctataaaagaattgcacgtatgagaaacctatatttcaatactgctgaaacagacatgaaataaagaatttaaagaatgaaaaaaaaaaaaaaaaaa

SEQ ID NO: 678 - protein, 106 aa, Homo sapiens
MVDLTQVMDDEVFMAFASYATIILSKMMLMSTATAFYRLTRKVFANPEDCVAFGKGENAKKYLRTDDRVERVRSHCKAVTISIFERQSQNGATNEVKSMLYRVQQL

SEQ ID NO: 679 - DNA, 1509 bp, Homo sapiens
acagtccctgcattgcgcgcgacccggcggcgggacaggcttgctgcttcctcctcctcggcctcaccattccagaccaaaattgaaaaaatggttgacctcacccaggtaatggatgatgaagtattcatggcttttgcatcctatgcaacaattattctttcaaaaatgatgcttatgagtactgcaactgcattctatagattgacaagaaaggtttttgccaatccagaagactgtgtagcatttggcaaaggagaaaatgccaagaagtatcttcgaacagatgacagagtagaacgtgtacgcagaatcaaacaaaccctgagcatttatcttgcctcttctatataaagtttaactcggcataaccaattgctgatgaagaagaaatgtttccttgtagaagcaaaccagtgaataattgaagaaaaaatttatcttttcaacatctaatgagttaatggattcaagcaaagattatccacggctgttaacaacacaaaaagacaatcggaaattagctattactgcgggaagtacccaataccatctatgaaactgtgtggacaaaaacactgacaaaaatctccacgaatctctaattttgaatacaaatttaaagaaaatgcaaaggattaaaatagaccatgatgaagtcagaaaaattcagacagagaaaaatgctccaggaccagaaacccatttcttccgcaaaagcttccaggtagagattgactgaccgagagaacagagacatagagagaacctagagattaaaagaaacttgagcgatttgtcagcattcagttgcaacgtatggatgtgatttgaattctaatttaaaaaccaaagtagaaagtggtaaacaattggggaaatgtgaacaatgatagaatatttaatattaatgaaatatgttaaatattttcagatatgataatggcattgagtatgtaaaaaagagcctgtttttaaagaaatacctctgaaatacagatgatataatatcatctgtatattagatgatattatatatatcagtatcatcagaataaagtaaggttagcatgaattgttaattgttgacactgtgcaataggtacgtggataattactatactgttctcattccttttatttatgtttgaaatgttctaaaattaaaagttaaagcatagagtgtaaagttgagcaaattcctccaagacctaaatatagcttatcaaaacttacattaattagatgctgactgttgagctaatacttttttttaatgatgtgtgcttcagtttattgcacttttcaaatactccagttttttgtgtgcgtgtgttttttaaattttattattattaaagttttagggtacatgtgcaaaaaaaaaaaaaaaaaaaaaaaaaaaaaaaaaaaaaaaaaaaaaaaaaaaaaaaaaaaaaaaaaaaaaaaaaaaaaaaaaaaaaaaaaaaaaaaaaaaaaaaaaaaaaaaaaaaaaaaaaaaaaaaaaaa

SEQ ID NO: 680 - protein, 87 aa, Homo sapiens
MVDLTQVMDDEVFMAFASYATIILSKMMLMSTATAFYRLTRKVFANPEDCVAFGKGENAKKYLRTDDRVERVRRIKQTLSIYLASSI

SEQ ID NO: 681 - DNA, 3406 bp, Homo sapiens
gagtactgtgaagatgtggtccccaaggctagagctgaaaagaggcttagggccgggtgagccttccagccagggcctgcctccaagtgatgctcccccagggcagggggcataaggatggcacccagccaggtgggagcctgggccctgcccagcctcaaagctttgagctcaggaaatccggaggcaggggagggggacatcgttgccacattccccagccctttaagacccccaaggcaggaaggctgcccgggcctcaccagcttccctcacaggctccttcctgggaggaaggggctgcctgtgccctcgaaggcgcaagggagggcaggagggaggctcggaaggtgttgcaatccccagcccccgggcctgtcagaggctgagccattaacgacagagctcggggagagaagctggactgcagctggtttcaggaacttctcttgacgagaagagagaccaaggaggccaagcaggggctgggccagaggtgccaacatggggaaactgaggctcggctcggaaaggtgaagtaacttgtccaagatcacaaagctggtgaacatcaagttggtgctatggcaaggctgggaaactgcagcctgacttgggctgccctgatcatcctgctgctccccggaagtctggaggagtgcgggcacatcagtgtctcagcccccatcgtccacctgggggatcccatcacagcctcctgcatcatcaagcagaactgcagccatctggacccggagccacagattctgtggagactgggagcagagcttcagcccgggggcaggcagcagcgtctgtctgatgggacccaggaatctatcatcaccctgccccacctcaaccacactcaggcctttctctcctgctgcctgaactggggcaacagcctgcagatcctggaccaggttgagctgcgcgcaggctaccctccagccataccccacaacctctcctgcctcatgaacctcacaaccagcagcctcatctgccagtgggagccaggacctgagacccacctacccaccagcttcactctgaagagtttcaagagccggggcaactgtcagacccaaggggactccatcctggactgcgtgcccaaggacgggcagagccactgctgcatcccacgcaaacacctgctgttgtaccagaatatgggcatctgggtgcaggcagagaatgcgctggggaccagcatgtccccacaactgtgtcttgatcccatggatgttgtgaaactggagccccccatgctgcggaccatggaccccagccctgaagcggcccctccccaggcaggctgcctacagctgtgctgggagccatggcagccaggcctgcacataaatcagaagtgtgagctgcgccacaagccgcagcgtggagaagccagctgggcactggtgggccccctccccttggaggcccttcagtatgagctctgcgggctcctcccagccacggcctacaccctgcagatacgctgcatccgctggcccctgcctggccactggagcgactggagccccagcctggagctgagaactaccgaacgggcccccactgtcagactggacacatggtggcggcagaggcagctggaccccaggacagtgcagctgttctggaagccagtgcccctggaggaagacagcggacggatccaaggttatgtggtttcttggagaccctcaggccaggctggggccatcctgcccctctgcaacaccacagagctcagctgcaccttccacctgccttcagaagcccaggaggtggcccttgtggcctataactcagccgggacctctcgtcccactccggtggtcttctcagaaagcagaggcccagctctgaccagactccatgccatggcccgagaccctcacagcctctgggtaggctgggagccccccaatccatggcctcagggctatgtgattgagtggggcctgggcccccccagcgcgagcaatagcaacaagacctggaggatggaacagaatgggagagccacggggtttctgctgaaggagaacatcaggccctttcagctctatgagatcatcgtgactcccttgtaccaggacaccatgggaccctcccagcatgtctatgcctactctcaagaaatggctccctcccatgccccagagctgcatctaaagcacattggcaagacctgggcacagctggagtgggtgcctgagccccctgagctggggaagagcccccttacccactacaccatcttctggaccaacgctcagaaccagtccttctccgccatcctgaatgcctcctcccgtggctttgtcctccatggcctggagcccgccagtctgtatcacatccacctcatggctgccagccaggctggggccaccaacagtacagtcctcaccctgatgaccttgaccccagaggggtcggagctacacatcatcctgggcctgttcggcctcctgctgttgctcacctgcctctgtggaactgcctggctctgttgcagccccaagaagaatcccctctggccaagtgtcccagacccagctcacagcagcctgggctcctgggtgcccacaatcatggaggaggatgccttccagctgcccggccttggcacgccacccatcaccaagctcacagtgctggaggaggatgaaaagaagccggtgccctgggagtcccataacagctcagagacctgtggcctccccactctggtccagacctatgtgctccagggggacccaagagcagtttccacccagccccaatcccagtctggcaccagcgatcaggtcctttatgggcagctgctgggcagccccacaagcccagggccagggcactatctccgctgtgactccactcagcccctcttggcgggcctcacccccagccccaagtcctatgagaacctctggttccaggccagccccttggggaccctggtaaccccagccccaagccaggaggacgactgtgtctttgggccactgctcaacttccccctcctgcaggggatccgggtccatgggatggaggcgctggggagcttctagggcttcctggggttcccttcttgggcctgcctcttaaaggcctgagctagctggagaagaggggagggtccataagcccatgactaaaaactaccccagcccaggctctcaccatctccagtcaccagcatctccctctcctcccaatctccataggctgggcctcccaggcgatctgcatactttaaggaccagatcatgctccatccagccccacccaatggccttttgtgcttgtttcctataacttcagtattgtaaactagtttttggtttgcagtttttgttgttgtttatagacactcttgggtgta

SEQ ID NO: 682 - protein, 835 aa, Homo sapiens
MARLGNCSLTWAALIILLLPGSLEECGHISVSAPIVHLGDPITASCIIKQNCSHLDPEPQILWRLGAELQPGGRQQRLSDGTQESIITLPHLNHTQAFLSCCLNWGNSLQILDQVELRAGYPPAIPHNLSCLMNLTTSSLICQWEPGPETHLPTSFTLKSFKSRGNCQTQGDSILDCVPKDGQSHCCIPRKHLLLYQNMGIWVQAENALGTSMSPQLCLDPMDVVKLEPPMLRTMDPSPEAAPPQAGCLQLCWEPWQPGLHINQKCELRHKPQRGEASWALVGPLPLEALQYELCGLLPATAYTLQIRCIRWPLPGHWSDWSPSLELRTTERAPTVRLDTWWRQRQLDPRTVQLFWKPVPLEEDSGRIQGYVVSWRPSGQAGAILPLCNTTELSCTFHLPSEAQEVALVAYNSAGTSRPTPVVFSESRGPALTRLHAMARDPHSLWVGWEPPNPWPQGYVIEWGLGPPSASNSNKTWRMEQNGRATGFLLKENIRPFQLYEIIVTPLYQDTMGPSQHVYAYSQEMAPSHAPELHLKHIGKTWAQLEWVPEPPELGKSPLTHYTIFWTNAQNQSFSAILNASSRGFVLHGLEPASLYHIHLMAASQAGATNSTVLTLMTLTPEGSELHIILGLFGLLLLLTCLCGTAWLCCSPKKNPLWPSVPDPAHSSLGSWVPTIMEEDAFQLPGLGTPPITKLTVLEEDEKKPVPWESHNSSETCGLPTLVQTYVLQGDPRAVSTQPQSQSGTSDQVLYGQLLGSPTSPGPGHYLRCDSTQPLLAGLTPSPKSYENLWFQASPLGTLVTPAPSQEDDCVFGPLLNFPLLQGIRVHGMEALGSF

SEQ ID NO: 683 - DNA, 3487 bp, Homo sapiens
gagtactgtgaagatgtggtccccaaggctagagctgaaaagaggcttagggccgggtgagccttccagccagggcctgcctccaagtgatgctcccccagggcagggggcataaggatggcacccagccaggtgggagcctgggccctgcccagcctcaaagctttgagctcaggaaatccggaggcaggggagggggacatcgttgccacattccccagccctttaagacccccaaggcaggaaggctgcccgggcctcaccagcttccctcacaggctccttcctgggaggaaggggctgcctgtgccctcgaaggcgcaagggagggcaggagggaggctcggaaggtgttgcaatccccagcccccgggcctgtcagaggctgagccattaacgacagagctcggggagagaagctggactgcagctggtttcaggaacttctcttgacgagaagagagaccaaggaggccaagcaggggctgggccagaggtgccaacatggggaaactgaggctcggctcggaaaggtgaagtaacttgtccaagatcacaaagctggtgaacatcaagttggtgctatggcaaggctgggaaactgcagcctgacttgggctgccctgatcatcctgctgctccccggaagtctggaggagtgcgggcacatcagtgtctcagcccccatcgtccacctgggggatcccatcacagcctcctgcatcatcaagcagaactgcagccatctggacccggagccacagattctgtggagactgggagcagagcttcagcccgggggcaggcagcagcgtctgtctgatgggacccaggaatctatcatcaccctgccccacctcaaccacactcaggcctttctctcctgctgcctgaactggggcaacagcctgcagatcctggaccaggttgagctgcgcgcaggctaccctccagccataccccacaacctctcctgcctcatgaacctcacaaccagcagcctcatctgccagtgggagccaggacctgagacccacctacccaccagcttcactctgaagagtttcaagagccggggcaactgtcagacccaaggggactccatcctggactgcgtgcccaaggacgggcagagccactgctgcatcccacgcaaacacctgctgttgtaccagaatatgggcatctgggtgcaggcagagaatgcgctggggaccagcatgtccccacaactgtgtcttgatcccatggatgttgtgaaactggagccccccatgctgcggaccatggaccccagccctgaagcggcccctccccaggcaggctgcctacagctgtgctgggagccatggcagccaggcctgcacataaatcagaagtgtgagctgcgccacaagccgcagcgtggagaagccagctgggcactggtgggccccctccccttggaggcccttcagtatgagctctgcgggctcctcccagccacggcctacaccctgcagatacgctgcatccgctggcccctgcctggccactggagcgactggagccccagcctggagctgagaactaccgaacgggcccccactgtcagactggacacatggtggcggcagaggcagctggaccccaggacagtgcagctgttctggaagccagtgcccctggaggaagacagcggacggatccaaggttatgtggtttcttggagaccctcaggccaggctggggccatcctgcccctctgcaacaccacagagctcagctgcaccttccacctgccttcagaagcccaggaggtggcccttgtggcctataactcagccgggacctctcgtcccactccggtggtcttctcagaaagcagaggcccagctctgaccagactccatgccatggcccgagaccctcacagcctctgggtaggctgggagccccccaatccatggcctcagggctatgtgattgagtggggcctgggcccccccagcgcgagcaatagcaacaagacctggaggatggaacagaatgggagagccacggggtttctgctgaaggagaacatcaggccctttcagctctatgagatcatcgtgactcccttgtaccaggacaccatgggaccctcccagcatgtctatgcctactctcaagaaatggctccctcccatgccccagagctgcatctaaagcacattggcaagacctgggcacagctggagtgggtgcctgagccccctgagctggggaagagcccccttacccactacaccatcttctggaccaacgctcagaaccagtccttctccgccatcctgaatgcctcctcccgtggctttgtcctccatggcctggagcccgccagtctgtatcacatccacctcatggctgccagccaggctggggccaccaacagtacagtcctcaccctgatgaccttgaccccagaggggtcggagctacacatcatcctgggcctgttcggcctcctgctgttgctcacctgcctctgtggaactgcctggctctgttgcagccccaagaagaatcccctctggccaagtgtcccagacccagctcacagcagcctgggctcctgggtgcccacaatcatggaggagctgcccggacccagacagggacagtggctggggcagacatctgaaatgagccgtgctctcaccccacatccttgtgtgcaggatgccttccagctgcccggccttggcacgccacccatcaccaagctcacagtgctggaggaggatgaaaagaagccggtgccctgggagtcccataacagctcagagacctgtggcctccccactctggtccagacctatgtgctccagggggacccaagagcagtttccacccagccccaatcccagtctggcaccagcgatcaggtcctttatgggcagctgctgggcagccccacaagcccagggccagggcactatctccgctgtgactccactcagcccctcttggcgggcctcacccccagccccaagtcctatgagaacctctggttccaggccagccccttggggaccctggtaaccccagccccaagccaggaggacgactgtgtctttgggccactgctcaacttccccctcctgcaggggatccgggtccatgggatggaggcgctggggagcttctagggcttcctggggttcccttcttgggcctgcctcttaaaggcctgagctagctggagaagaggggagggtccataagcccatgactaaaaactaccccagcccaggctctcaccatctccagtcaccagcatctccctctcctcccaatctccataggctgggcctcccaggcgatctgcatactttaaggaccagatcatgctccatccagccccacccaatggccttttgtgcttgtttcctataacttcagtattgtaaactagtttttggtttgcagtttttgttgttgtttatagacactcttgggtgta

SEQ ID NO: 684 - protein, 862 aa, Homo sapiens
MARLGNCSLTWAALIILLLPGSLEECGHISVSAPIVHLGDPITASCIIKQNCSHLDPEPQILWRLGAELQPGGRQQRLSDGTQESIITLPHLNHTQAFLSCCLNWGNSLQILDQVELRAGYPPAIPHNLSCLMNLTTSSLICQWEPGPETHLPTSFTLKSFKSRGNCQTQGDSILDCVPKDGQSHCCIPRKHLLLYQNMGIWVQAENALGTSMSPQLCLDPMDVVKLEPPMLRTMDPSPEAAPPQAGCLQLCWEPWQPGLHINQKCELRHKPQRGEASWALVGPLPLEALQYELCGLLPATAYTLQIRCIRWPLPGHWSDWSPSLELRTTERAPTVRLDTWWRQRQLDPRTVQLFWKPVPLEEDSGRIQGYVVSWRPSGQAGAILPLCNTTELSCTFHLPSEAQEVALVAYNSAGTSRPTPVVFSESRGPALTRLHAMARDPHSLWVGWEPPNPWPQGYVIEWGLGPPSASNSNKTWRMEQNGRATGFLLKENIRPFQLYEIIVTPLYQDTMGPSQHVYAYSQEMAPSHAPELHLKHIGKTWAQLEWVPEPPELGKSPLTHYTIFWTNAQNQSFSAILNASSRGFVLHGLEPASLYHIHLMAASQAGATNSTVLTLMTLTPEGSELHIILGLFGLLLLLTCLCGTAWLCCSPKKNPLWPSVPDPAHSSLGSWVPTIMEELPGPRQGQWLGQTSEMSRALTPHPCVQDAFQLPGLGTPPITKLTVLEEDEKKPVPWESHNSSETCGLPTLVQTYVLQGDPRAVSTQPQSQSGTSDQVLYGQLLGSPTSPGPGHYLRCDSTQPLLAGLTPSPKSYENLWFQASPLGTLVTPAPSQEDDCVFGPLLNFPLLQGIRVHGMEALGSF

SEQ ID NO: 685 - DNA, 3052 bp, Homo sapiens
gtccctgacaacactggcatggcttccccaggagaacctgcctagtactcatgcatgcccaacctggatgtgccagggaatgaacaccccaagaggcatcccttgaccaatggggggcaggagtcagtgaacatcaagttggtgctatggcaaggctgggaaactgcagcctgacttgggctgccctgatcatcctgctgctccccggaagtctggaggagtgcgggcacatcagtgtctcagcccccatcgtccacctgggggatcccatcacagcctcctgcatcatcaagcagaactgcagccatctggacccggagccacagattctgtggagactgggagcagagcttcagcccgggggcaggcagcagcgtctgtctgatgggacccaggaatctatcatcaccctgccccacctcaaccacactcaggcctttctctcctgctgcctgaactggggcaacagcctgcagatcctggaccaggttgagctgcgcgcaggctaccctccagccataccccacaacctctcctgcctcatgaacctcacaaccagcagcctcatctgccagtgggagccaggacctgagacccacctacccaccagcttcactctgaagagtttcaagagccggggcaactgtcagacccaaggggactccatcctggactgcgtgcccaaggacgggcagagccactgctgcatcccacgcaaacacctgctgttgtaccagaatatgggcatctgggtgcaggcagagaatgcgctggggaccagcatgtccccacaactgtgtcttgatcccatggatgttgtgaaactggagccccccatgctgcggaccatggaccccagccctgaagcggcccctccccaggcaggctgcctacagctgtgctgggagccatggcagccaggcctgcacataaatcagaagtgtgagctgcgccacaagccgcagcgtggagaagccagctgggcactggtgggccccctccccttggaggcccttcagtatgagctctgcgggctcctcccagccacggcctacaccctgcagatacgctgcatccgctggcccctgcctggccactggagcgactggagccccagcctggagctgagaactaccgaacgggcccccactgtcagactggacacatggtggcggcagaggcagctggaccccaggacagtgcagctgttctggaagccagtgcccctggaggaagacagcggacggatccaaggttatgtggtttcttggagaccctcaggccaggctggggccatcctgcccctctgcaacaccacagagctcagctgcaccttccacctgccttcagaagcccaggaggtggcccttgtggcctataactcagccgggacctctcgtcccactccggtggtcttctcagaaagcagaggcccagctctgaccagactccatgccatggcccgagaccctcacagcctctgggtaggctgggagccccccaatccatggcctcagggctatgtgattgagtggggcctgggcccccccagcgcgagcaatagcaacaagacctggaggatggaacagaatgggagagccacggggtttctgctgaaggagaacatcaggccctttcagctctatgagatcatcgtgactcccttgtaccaggacaccatgggaccctcccagcatgtctatgcctactctcaagaaatggctccctcccatgccccagagctgcatctaaagcacattggcaagacctgggcacagctggagtgggtgcctgagccccctgagctggggaagagcccccttacccactacaccatcttctggaccaacgctcagaaccagtccttctccgccatcctgaatgcctcctcccgtggctttgtcctccatggcctggagcccgccagtctgtatcacatccacctcatggctgccagccaggctggggccaccaacagtacagtcctcaccctgatgaccttgaccccagaggggtcggagctacacatcatcctgggcctgttcggcctcctgctgttgctcacctgcctctgtggaactgcctggctctgttgcagccccaacaggaagaatcccctctggccaagtgtcccagacccagctcacagcagcctgggctcctgggtgcccacaatcatggaggagctgcccggacccagacagggacagtggctggggcagacatctgaaatgagccgtgctctcaccccacatccttgtgtgcaggatgccttccagctgcccggccttggcacgccacccatcaccaagctcacagtgctggaggaggatgaaaagaagccggtgccctgggagtcccataacagctcagagacctgtggcctccccactctggtccagacctatgtgctccagggggacccaagagcagtttccacccagccccaatcccagtctggcaccagcgatcaggtcctttatgggcagctgctgggcagccccacaagcccagggccagggcactatctccgctgtgactccactcagcccctcttggcgggcctcacccccagccccaagtcctatgagaacctctggttccaggccagccccttggggaccctggtaaccccagccccaagccaggaggacgactgtgtctttgggccactgctcaacttccccctcctgcaggggatccgggtccatgggatggaggcgctggggagcttctagggcttcctggggttcccttcttgggcctgcctcttaaaggcctgagctagctggagaagaggggagggtccataagcccatgactaaaaactaccccagcccaggctctcaccatctccagtcaccagcatctccctctcctcccaatctccataggctgggcctcccaggcgatctgcatactttaaggaccagatcatgctccatccagccccacccaatggccttttgtgcttgtttcctataacttcagtattgtaaactagtttttggtttgcagtttttgttgttgtttatagacactcttgggtgta

SEQ ID NO: 686 - protein, 863 aa, Homo sapiens
MARLGNCSLTWAALIILLLPGSLEECGHISVSAPIVHLGDPITASCIIKQNCSHLDPEPQILWRLGAELQPGGRQQRLSDGTQESIITLPHLNHTQAFLSCCLNWGNSLQILDQVELRAGYPPAIPHNLSCLMNLTTSSLICQWEPGPETHLPTSFTLKSFKSRGNCQTQGDSILDCVPKDGQSHCCIPRKHLLLYQNMGIWVQAENALGTSMSPQLCLDPMDVVKLEPPMLRTMDPSPEAAPPQAGCLQLCWEPWQPGLHINQKCELRHKPQRGEASWALVGPLPLEALQYELCGLLPATAYTLQIRCIRWPLPGHWSDWSPSLELRTTERAPTVRLDTWWRQRQLDPRTVQLFWKPVPLEEDSGRIQGYVVSWRPSGQAGAILPLCNTTELSCTFHLPSEAQEVALVAYNSAGTSRPTPVVFSESRGPALTRLHAMARDPHSLWVGWEPPNPWPQGYVIEWGLGPPSASNSNKTWRMEQNGRATGFLLKENIRPFQLYEIIVTPLYQDTMGPSQHVYAYSQEMAPSHAPELHLKHIGKTWAQLEWVPEPPELGKSPLTHYTIFWTNAQNQSFSAILNASSRGFVLHGLEPASLYHIHLMAASQAGATNSTVLTLMTLTPEGSELHIILGLFGLLLLLTCLCGTAWLCCSPNRKNPLWPSVPDPAHSSLGSWVPTIMEELPGPRQGQWLGQTSEMSRALTPHPCVQDAFQLPGLGTPPITKLTVLEEDEKKPVPWESHNSSETCGLPTLVQTYVLQGDPRAVSTQPQSQSGTSDQVLYGQLLGSPTSPGPGHYLRCDSTQPLLAGLTPSPKSYENLWFQASPLGTLVTPAPSQEDDCVFGPLLNFPLLQGIRVHGMEALGSF

SEQ ID NO: 687 - DNA, 3015 bp, Homo sapiens
aattgaccctccagtggacagctctgagaagtgttctacatggctctttggaaggttccagcaggatagagccccagttgtccatagaggtgaacatcaagttggtgctatggcaaggctgggaaactgcagcctgacttgggctgccctgatcatcctgctgctccccggaagtctggaggagtgcgggcacatcagtgtctcagcccccatcgtccacctgggggatcccatcacagcctcctgcatcatcaagcagaactgcagccatctggacccggagccacagattctgtggagactgggagcagagcttcagcccgggggcaggcagcagcgtctgtctgatgggacccaggaatctatcatcaccctgccccacctcaaccacactcaggcctttctctcctgctgcctgaactggggcaacagcctgcagatcctggaccaggttgagctgcgcgcaggctaccctccagccataccccacaacctctcctgcctcatgaacctcacaaccagcagcctcatctgccagtgggagccaggacctgagacccacctacccaccagcttcactctgaagagtttcaagagccggggcaactgtcagacccaaggggactccatcctggactgcgtgcccaaggacgggcagagccactgctgcatcccacgcaaacacctgctgttgtaccagaatatgggcatctgggtgcaggcagagaatgcgctggggaccagcatgtccccacaactgtgtcttgatcccatggatgttgtgaaactggagccccccatgctgcggaccatggaccccagccctgaagcggcccctccccaggcaggctgcctacagctgtgctgggagccatggcagccaggcctgcacataaatcagaagtgtgagctgcgccacaagccgcagcgtggagaagccagctgggcactggtgggccccctccccttggaggcccttcagtatgagctctgcgggctcctcccagccacggcctacaccctgcagatacgctgcatccgctggcccctgcctggccactggagcgactggagccccagcctggagctgagaactaccgaacgggcccccactgtcagactggacacatggtggcggcagaggcagctggaccccaggacagtgcagctgttctggaagccagtgcccctggaggaagacagcggacggatccaaggttatgtggtttcttggagaccctcaggccaggctggggccatcctgcccctctgcaacaccacagagctcagctgcaccttccacctgccttcagaagcccaggaggtggcccttgtggcctataactcagccgggacctctcgtcccactccggtggtcttctcagaaagcagaggcccagctctgaccagactccatgccatggcccgagaccctcacagcctctgggtaggctgggagccccccaatccatggcctcagggctatgtgattgagtggggcctgggcccccccagcgcgagcaatagcaacaagacctggaggatggaacagaatgggagagccacggggtttctgctgaaggagaacatcaggccctttcagctctatgagatcatcgtgactcccttgtaccaggacaccatgggaccctcccagcatgtctatgcctactctcaagaaatggctccctcccatgccccagagctgcatctaaagcacattggcaagacctgggcacagctggagtgggtgcctgagccccctgagctggggaagagcccccttacccactacaccatcttctggaccaacgctcagaaccagtccttctccgccatcctgaatgcctcctcccgtggctttgtcctccatggcctggagcccgccagtctgtatcacatccacctcatggctgccagccaggctggggccaccaacagtacagtcctcaccctgatgaccttgaccccagaggggtcggagctacacatcatcctgggcctgttcggcctcctgctgttgctcacctgcctctgtggaactgcctggctctgttgcagccccaacaggaagaatcccctctggccaagtgtcccagacccagctcacagcagcctgggctcctgggtgcccacaatcatggaggagctgcccggacccagacagggacagtggctggggcagacatctgaaatgagccgtgctctcaccccacatccttgtgtgcaggatgccttccagctgcccggccttggcacgccacccatcaccaagctcacagtgctggaggaggatgaaaagaagccggtgccctgggagtcccataacagctcagagacctgtggcctccccactctggtccagacctatgtgctccagggggacccaagagcagtttccacccagccccaatcccagtctggcaccagcgatcaggtcctttatgggcagctgctgggcagccccacaagcccagggccagggcactatctccgctgtgactccactcagcccctcttggcgggcctcacccccagccccaagtcctatgagaacctctggttccaggccagccccttggggaccctggtaaccccagccccaagccaggaggacgactgtgtctttgggccactgctcaacttccccctcctgcaggggatccgggtccatgggatggaggcgctggggagcttctagggcttcctggggttcccttcttgggcctgcctcttaaaggcctgagctagctggagaagaggggagggtccataagcccatgactaaaaactaccccagcccaggctctcaccatctccagtcaccagcatctccctctcctcccaatctccataggctgggcctcccaggcgatctgcatactttaaggaccagatcatgctccatccagccccacccaatggccttttgtgcttgtttcctataacttcagtattgtaaactagtttttggtttgcagtttttgttgttgtttatagacactcttgggtgta

SEQ ID NO: 688 - protein, 863 aa, Homo sapiens; identical to SEQ ID NO: 686

SEQ ID NO: 689 - DNA, 2320 bp, Homo sapiens
gaacctcacaaccagcagcctcatctgccagtgggagccaggacctgagacccacctacccaccagcttcactctgaagagtttcaatgaaactggagccccccatgctgcggaccatggaccccagccctgaagcggcccctccccaggcaggctgcctacagctgtgctgggagccatggcagccaggcctgcacataaatcagaagtgtgagctgcgccacaagccgcagcgtggagaagccagctgggcactggtgggccccctccccttggaggcccttcagtatgagctctgcgggctcctcccagccacggcctacaccctgcagatacgctgcatccgctggcccctgcctggccactggagcgactggagccccagcctggagctgagaactaccgaacgggcccccactgtcagactggacacatggtggcggcagaggcagctggaccccaggacagtgcagctgttctggaagccagtgcccctggaggaagacagcggacggatccaaggttatgtggtttcttggagaccctcaggccaggctggggccatcctgcccctctgcaacaccacagagctcagctgcaccttccacctgccttcagaagcccaggaggtggcccttgtggcctataactcagccgggacctctcgtcccactccggtggtcttctcagaaagcagaggcccagctctgaccagactccatgccatggcccgagaccctcacagcctctgggtaggctgggagccccccaatccatggcctcagggctatgtgattgagtggggcctgggcccccccagcgcgagcaatagcaacaagacctggaggatggaacagaatgggagagccacggggtttctgctgaaggagaacatcaggccctttcagctctatgagatcatcgtgactcccttgtaccaggacaccatgggaccctcccagcatgtctatgcctactctcaagaaatggctccctcccatgccccagagctgcatctaaagcacattggcaagacctgggcacagctggagtgggtgcctgagccccctgagctggggaagagcccccttacccactacaccatcttctggaccaacgctcagaaccagtccttctccgccatcctgaatgcctcctcccgtggctttgtcctccatggcctggagcccgccagtctgtatcacatccacctcatggctgccagccaggctggggccaccaacagtacagtcctcaccctgatgaccttgaccccagaggggtcggagctacacatcatcctgggcctgttcggcctcctgctgttgctcacctgcctctgtggaactgcctggctctgttgcagccccaacaggaagaatcccctctggccaagtgtcccagacccagctcacagcagcctgggctcctgggtgcccacaatcatggaggagctgcccggacccagacagggacagtggctggggcagacatctgaaatgagccgtgctctcaccccacatccttgtgtgcaggatgccttccagctgcccggccttggcacgccacccatcaccaagctcacagtgctggaggaggatgaaaagaagccggtgccctgggagtcccataacagctcagagacctgtggcctccccactctggtccagacctatgtgctccagggggacccaagagcagtttccacccagccccaatcccagtctggcaccagcgatcaggtcctttatgggcagctgctgggcagccccacaagcccagggccagggcactatctccgctgtgactccactcagcccctcttggcgggcctcacccccagccccaagtcctatgagaacctctggttccaggccagccccttggggaccctggtaaccccagccccaagccaggaggacgactgtgtctttgggccactgctcaacttccccctcctgcaggggatccgggtccatgggatggaggcgctggggagcttctagggcttcctggggttcccttcttgggcctgcctcttaaaggcctgagctagctggagaagaggggagggtccataagcccatgactaaaaactaccccagcccaggctctcaccatctccagtcaccagcatctccctctcctcccaatctccataggctgggcctcccaggcgatctgcatactttaaggaccagatcatgctccatccagccccacccaatggccttttgtgcttgtttcctataacttcagtattgtaaactagtttttggtttgcagtttttgttgttgtttatagacactcttgggtgta

SEQ ID NO: 690 - protein, 639 aa, Homo sapiens
MKLEPPMLRTMDPSPEAAPPQAGCLQLCWEPWQPGLHINQKCELRHKPQRGEASWALVGPLPLEALQYELCGLLPATAYTLQIRCIRWPLPGHWSDWSPSLELRTTERAPTVRLDTWWRQRQLDPRTVQLFWKPVPLEEDSGRIQGYVVSWRPSGQAGAILPLCNTTELSCTFHLPSEAQEVALVAYNSAGTSRPTPVVFSESRGPALTRLHAMARDPHSLWVGWEPPNPWPQGYVIEWGLGPPSASNSNKTWRMEQNGRATGFLLKENIRPFQLYEIIVTPLYQDTMGPSQHVYAYSQEMAPSHAPELHLKHIGKTWAQLEWVPEPPELGKSPLTHYTIFWTNAQNQSFSAILNASSRGFVLHGLEPASLYHIHLMAASQAGATNSTVLTLMTLTPEGSELHIILGLFGLLLLLTCLCGTAWLCCSPNRKNPLWPSVPDPAHSSLGSWVPTIMEELPGPRQGQWLGQTSEMSRALTPHPCVQDAFQLPGLGTPPITKLTVLEEDEKKPVPWESHNSSETCGLPTLVQTYVLQGDPRAVSTQPQSQSGTSDQVLYGQLLGSPTSPGPGHYLRCDSTQPLLAGLTPSPKSYENLWFQASPLGTLVTPAPSQEDDCVFGPLLNFPLLQGIRVHGMEALGSF

SEQ ID NO: 691 - DNA, 1624 bp, Homo sapiens
tctagagaagccaatcagcgtcgccgcggtcccagttctaaagtccccacgcacccacccggactcagagtctcctcagacgccgagatgctggtcatggcgccccgaaccgtcctcctgctgctctcggcggccctggccctgaccgagacctgggccggctcccactccatgaggtatttctacacctccgtgtcccggcccggccgcggggagccccgcttcatctcagtgggctacgtggacgacacccagttcgtgaggttcgacagcgacgccgcgagtccgagagaggagccgcgggcgccgtggatagagcaggaggggccggagtattgggaccggaacacacagatctacaaggcccaggcacagactgaccgagagagcctgcggaacctgcgcggctactacaaccagagcgaggccgggtctcacaccctccagagcatgtacggctgcgacgtggggccggacgggcgcctcctccgcgggcatgaccagtacgcctacgacggcaaggattacatcgccctgaacgaggacctgcgctcctggaccgccgcggacacggcggctcagatcacccagcgcaagtgggaggcggcccgtgaggcggagcagcggagagcctacctggagggcgagtgcgtggagtggctccgcagatacctggagaacgggaaggacaagctggagcgcgctgaccccccaaagacacacgtgacccaccaccccatctctgaccatgaggccaccctgaggtgctgggccctgggtttctaccctgcggagatcacactgacctggcagcgggatggcgaggaccaaactcaggacactgagcttgtggagaccagaccagcaggagatagaaccttccagaagtgggcagctgtggtggtgccttctggagaagagcagagatacacatgccatgtacagcatgaggggctgccgaagcccctcaccctgagatgggagccgtcttcccagtccaccgtccccatcgtgggcattgttgctggcctggctgtcctagcagttgtggtcatcggagctgtggtcgctgctgtgatgtgtaggaggaagagttcaggtggaaaaggagggagctactctcaggctgcgtgcagcgacagtgcccagggctctgatgtgtctctcacagcttgaaaagcctgagacagctgtcttgtgagggactgagatgcaggatttcttcacgcctcccctttgtgacttcaagagcctctggcatctctttctgcaaaggcacctgaatgtgtctgcgtccctgttagcataatgtgaggaggtggagagacagcccacccttgtgtccactgtgacccctgttcccatgctgacctgtgtttcctccccagtcatctttcttgttccagagaggtggggctggatgtctccatctctgtctcaactttacgtgcactgagctgcaacttcttacttccctactgaaaataagaatctgaatataaatttgttttctcaaatatttgctatgagaggttgatggattaattaaataagtcaattcctggaatttgagagagcaaataaagacctgagaaccttccagaatctgcaaaaaaaaaaaaaa

SEQ ID NO: 692 - protein, 362 aa, Homo sapiens
MLVMAPRTVLLLLSAALALTETWAGSHSMRYFYTSVSRPGRGEPRFISVGYVDDTQFVRFDSDAASPREEPRAPWIEQEGPEYWDRNTQIYKAQAQTDRESLRNLRGYYNQSEAGSHTLQSMYGCDVGPDGRLLRGHDQYAYDGKDYIALNEDLRSWTAADTAAQITQRKWEAAREAEQRRAYLEGECVEWLRRYLENGKDKLERADPPKTHVTHHPISDHEATLRCWALGFYPAEITLTWQRDGEDQTQDTELVETRPAGDRTFQKWAAVVVPSGEEQRYTCHVQHEGLPKPLTLRWEPSSQSTVPIVGIVAGLAVLAVVVIGAVVAAVMCRRKSSGGKGGSYSQAACSDSAQGSDVSLTA

SEQ ID NO: 693 - DNA, 5288 bp, Homo sapiens
gttttccttggtctggggctccccacagttccccaccatcactcctcccattccttccaactttatttttagctgccattgggagggggcaggatgggagggaaagtgaagaaaacagaaaaggagagggacagaggccagaggacttctcatactggacagaaaccgatcaggcatggaactccccttcgtcactcacctgttcttgcccctggtgttcctgacaggtctctgctccccctttaacctggatgaacatcacccacgcctattcccagggccaccagaagctgaatttggatacagtgtcttacaacatgttgggggtggacagcgatggatgctggtgggcgccccctgggatgggccttcaggcgaccggaggggggacgtttatcgctgccctgtagggggggcccacaatgccccatgtgccaagggccacttaggtgactaccaactgggaaattcatctcatcctgctgtgaatatgcacctggggatgtctctgttagagacagatggtgatgggggattcatggcctgtgcccctctctggtctcgtgcttgtggcagctctgtcttcagttctgggatatgtgcccgtgtggatgcttcattccagcctcagggaagcctggcacccactgcccaacgctgcccaacatacatggatgttgtcattgtcttggatggctccaacagcatctacccctggtctgaagttcagaccttcctacgaagactggtagggaaactgtttattgacccagaacagatacaggtgggactggtacagtatggggagagccctgtacatgagtggtccctgggagatttccgaacgaaggaagaagtggtgagagcagcaaagaacctcagtcggcgggagggacgagaaacaaagactgcccaagcaataatggtggcctgcacagaagggttcagtcagtcccatgggggccgacccgaggctgccaggctactggtggttgtcactgatggagagtcccatgatggagaggagcttcctgcagcactaaaggcctgtgaggctggaagagtgacacgctatgggattgcagtccttggtcactacctccggcggcagcgagatcccagctctttcctgagagaaattagaactattgccagtgatccagatgagcgattcttcttcaatgtcacagatgaggctgctctgactgacattgtggatgcactaggagatcggatttttggccttgaagggtcccatgcagaaaacgaaagctcctttgggctggaaatgtctcagattggtttctccactcatcggctaaaggatgggattctttttgggatggtgggggcctatgactggggaggctctgtgctatggcttgaaggaggccaccgccttttccccccacgaatggcactggaagacgagttcccccctgcattgcagaaccatgcagcctacctgggttactctgtttcttccatgcttttgcggggtggacgccgcctgtttctctctggggctcctcgatttagacatcgaggaaaagtcatcgccttccagcttaagaaagatggggctgtgagggttgcccagagcctccagggggagcagattggttcatactttggcagtgagctctgcccattggatacagatagggatggaacaactgatgtcttacttgtggctgcccccatgttcctgggaccccagaacaaggaaacaggacgtgtttatgtgtatctggtaggccagcagtccttgctgaccctccaaggaacacttcagccagaacccccccaggatgctcggtttggctttgccatgggagctcttcctgatctgaaccaagatggttttgctgatgtggctgtgggggcgcctctggaagatgggcaccagggagcactgtacctgtaccatggaacccagagtggagtcaggccccatcctgcccagaggattgctgctgcctccatgccacatgccctcagctactttggccgaagtgtggatggtcggctagatctggatggagatgatctggtcgatgtggctgtgggtgcccagggggcagccatcctgctcagctcccggcccattgtccatctgaccccatcactggaggtgaccccacaggccatcagtgtggttcagagggactgtaggcggcgaggccaagaggcagtctgtctgactgcagccctttgcttccaagtgacctcccgtactcctggtcgctgggatcaccaattctacatgaggttcaccgcatcactggatgaatggactgctggggcacgtgcagcatttgatggctctggccagaggttgtcccctcggaggctccggctcagtgtggggaatgtcacttgtgagcagctacacttccatgtgctggatacatcagattacctccggccagtggccttgactgtgacctttgccttggacaatactacaaagccagggcctgtgctgaatgagggctcacccacctctatacaaaagctggtccccttctcaaaggattgtggccctgacaatgaatgtgtcacagacctggtgcttcaagtgaatatggacatcagaggctccaggaaggccccatttgtggttcgaggtggccggcggaaagtgctggtatctacaactctggagaacagaaaggaaaatgcttacaatacgagcctgagtctcatcttctctagaaacctccacctggccagtctcactcctcagagagagagcccaataaaggtggaatgtgccgccccttctgctcatgcccggctctgcagtgtggggcatcctgtcttccagactggagccaaggtgacctttctgctagagtttgagtttagctgctcctctctcctgagccaggtcttcgtgaagctgactgccagcagtgacagcctggagagaaatgggacccttcaagataacacagcccagacctcagcctacatccaatatgagccccacctcctgttctctagtgagtctaccctgcaccgctatgaggttcacccatatgggaccctcccagtgggtcctggcccagaattcaaaaccactctcagggttcagaacctaggctgctatgtggtcagtggcctcatcatctcagccctccttccagctgtggcccatgggggcaattacttcctatcactgtctcaagtcatcactaacaatgcaagctgcatagtgcagaacctgactgaacccccaggcccacctgtgcatccagaggagcttcaacacacaaacagactgaatgggagcaatactcagtgtcaggtggtgaggtgccaccttgggcagctggcaaaggggactgaggtctctgttggactattgaggctggttcacaatgaatttttccgaagagccaagttcaagtccctgacggtggtcagcacctttgagctgggaaccgaagagggcagtgtcctacagctgactgaagcctcccgttggagtgagagcctcttggaggtggttcagacccggcctatcctcatctccctgtggatcctcataggcagtgtcctgggagggttgctcctgcttgctctccttgtcttctgcctgtggaagcttggcttctttgcccataagaaaatccctgaggaagaaaaaagagaagagaagttggagcaatgaatgtagaataagggtctagaaagtcctccctggcagcttcttcaagagacttgcataaaagcagaggtttgggggctcagatgggacaagaagccgcctctggactatctccccagaccagcagcctgacttgacttttgagtcctagggatgctgctggctagagatgaggctttacctcagacaagaagagctggcaccaaaactagccatgctcccaccctctgcttccctcctcctcgtgatcctggttccatagccaacactggggcttttgtttggggtccttttatccccaggaatcaataatttttttgcctaggtgcctgactcctttcagattccctctttatcttccctcacagtttggaaaggatgagggttatcttcctcgattcttccaccctctcactttcctgcctgttccccactccacaggagggagctgacgttggcttgaaaggagtaaagtcaacatctgctgctttcctgtggactctggtgattcatagagccggatggggagagtcaacaggaaaaaaggagggaggaggaaaagccacaagagacattctgtacaattccaaggaacagagaagcctttagacaggcaactgccatcccccctgaaacctgagacctgtagtgcactcgaccgccctcaggtgttggtgaaacagagctgcccccaggctcgctgggcataggcttcctgattccaagccttttctgggagcaaagccagggcctggtgcctgattttctgaagccaggagccctcaggtggctggagctggaatagcagggaggactgggtgtacctaggcagtattttctctacttctctcaagtcttatactcactcttgagccctccttggggcctgcttagaaagcagacaggagagagagtactgctacttgatgatgggaaatgctttcactttaccagctttgggaagcagcagccccatgggatctaaaagtgtggagtctgcattaagaaacctacatgggtggcatggggctctggggagcaagcccttacttgctcagcactggttatgtagcacaaatagctcctaggaaaatgtttctggggcaaccctagaaccctggtcatattttgcagggtttctctggtggaatcagtttgccagcccttgcttgatgcttactggaaatctccaggttaatttctatctctgatccctccccaacccactccatatttgggtcatggacagtaaaggcagttggattctcatagacaactgggtaacttatatttctttgtaatcaagacttgagatatcgaagtcagttattggtctccagagtgcagctctgggagccttttgaagaatcagcactcattaagagctgagaagagagaagacctgattgggtggttgactagcagtcacagaacctgtcctcccaggctgttcctgaggcctgaccacagtatttattttggcatgtctctggccttctgcagaggcccaccctcatgggcattgtctctgtttcccagtggggtggacagtatatcagatggtcagaacaaataaagttcagtgtcaaatgaaaaaaaaaaaaaaaaaaaa

SEQ ID NO: 694 - protein, 1167 aa, Homo sapiens
MELPFVTHLFLPLVFLTGLCSPFNLDEHHPRLFPGPPEAEFGYSVLQHVGGGQRWMLVGAPWDGPSGDRRGDVYRCPVGGAHNAPCAKGHLGDYQLGNSSHPAVNMHLGMSLLETDGDGGFMACAPLWSRACGSSVFSSGICARVDASFQPQGSLAPTAQRCPTYMDVVIVLDGSNSIYPWSEVQTFLRRLVGKLFIDPEQIQVGLVQYGESPVHEWSLGDFRTKEEVVRAAKNLSRREGRETKTAQAIMVACTEGFSQSHGGRPEAARLLVVVTDGESHDGEELPAALKACEAGRVTRYGIAVLGHYLRRQRDPSSFLREIRTIASDPDERFFFNVTDEAALTDIVDALGDRIFGLEGSHAENESSFGLEMSQIGFSTHRLKDGILFGMVGAYDWGGSVLWLEGGHRLFPPRMALEDEFPPALQNHAAYLGYSVSSMLLRGGRRLFLSGAPRFRHRGKVIAFQLKKDGAVRVAQSLQGEQIGSYFGSELCPLDTDRDGTTDVLLVAAPMFLGPQNKETGRVYVYLVGQQSLLTLQGTLQPEPPQDARFGFAMGALPDLNQDGFADVAVGAPLEDGHQGALYLYHGTQSGVRPHPAQRIAAASMPHALSYFGRSVDGRLDLDGDDLVDVAVGAQGAAILLSSRPIVHLTPSLEVTPQAISVVQRDCRRRGQEAVCLTAALCFQVTSRTPGRWDHQFYMRFTASLDEWTAGARAAFDGSGQRLSPRRLRLSVGNVTCEQLHFHVLDTSDYLRPVALTVTFALDNTTKPGPVLNEGSPTSIQKLVPFSKDCGPDNECVTDLVLQVNMDIRGSRKAPFVVRGGRRKVLVSTTLENRKENAYNTSLSLIFSRNLHLASLTPQRESPIKVECAAPSAHARLCSVGHPVFQTGAKVTFLLEFEFSCSSLLSQVFVKLTASSDSLERNGTLQDNTAQTSAYIQYEPHLLFSSESTLHRYEVHPYGTLPVGPGPEFKTTLRVQNLGCYVVSGLIISALLPAVAHGGNYFLSLSQVITNNASCIVQNLTEPPGPPVHPEELQHTNRLNGSNTQCQVVRCHLGQLAKGTEVSVGLLRLVHNEFFRRAKFKSLTVVSTFELGTEEGSVLQLTEASRWSESLLEVVQTRPILISLWILIGSVLGGLLLLALLVFCLWKLGFFAHKKIPEEEKREEKLEQ

SEQ ID NO: 695 - DNA, 4971 bp, Homo sapiens
gttttccttggtctggggctccccacagttccccaccatcactcctcccattccttccaactttatttttagctgccattgggagggggcaggatgggagggaaagtgaagaaaacagaaaaggagagggacagaggccagaggacttctcatactggacagaaaccgatcaggcatggaactccccttcgtcactcacctgttcttgcccctggtgttcctgacaggtctctgctccccctttaacctggatgaacatcacccacgcctattcccagggccaccagaagctgaatttggatacagtgtcttacaacatgttgggggtggacagcgatggctgcccaacatacatggatgttgtcattgtcttggatggctccaacagcatctacccctggtctgaagttcagaccttcctacgaagactggtagggaaactgtttattgacccagaacagatacaggtgggactggtacagtatggggagagccctgtacatgagtggtccctgggagatttccgaacgaaggaagaagtggtgagagcagcaaagaacctcagtcggcgggagggacgagaaacaaagactgcccaagcaataatggtggcctgcacagaagggttcagtcagtcccatgggggccgacccgaggctgccaggctactggtggttgtcactgatggagagtcccatgatggagaggagcttcctgcagcactaaaggcctgtgaggctggaagagtgacacgctatgggattgcagtccttggtcactacctccggcggcagcgagatcccagctctttcctgagagaaattagaactattgccagtgatccagatgagcgattcttcttcaatgtcacagatgaggctgctctgactgacattgtggatgcactaggagatcggatttttggccttgaagggtcccatgcagaaaacgaaagctcctttgggctggaaatgtctcagattggtttctccactcatcggctaaaggatgggattctttttgggatggtgggggcctatgactggggaggctctgtgctatggcttgaaggaggccaccgccttttccccccacgaatggcactggaagacgagttcccccctgcattgcagaaccatgcagcctacctgggttactctgtttcttccatgcttttgcggggtggacgccgcctgtttctctctggggctcctcgatttagacatcgaggaaaagtcatcgccttccagcttaagaaagatggggctgtgagggttgcccagagcctccagggggagcagattggttcatactttggcagtgagctctgcccattggatacagatagggatggaacaactgatgtcttacttgtggctgcccccatgttcctgggaccccagaacaaggaaacaggacgtgtttatgtgtatctggtaggccagcagtccttgctgaccctccaaggaacacttcagccagaacccccccaggatgctcggtttggctttgccatgggagctcttcctgatctgaaccaagatggttttgctgatgtggctgtgggggcgcctctggaagatgggcaccagggagcactgtacctgtaccatggaacccagagtggagtcaggccccatcctgcccagaggattgctgctgcctccatgccacatgccctcagctactttggccgaagtgtggatggtcggctagatctggatggagatgatctggtcgatgtggctgtgggtgcccagggggcagccatcctgctcagctcccggcccattgtccatctgaccccatcactggaggtgaccccacaggccatcagtgtggttcagagggactgtaggcggcgaggccaagaggcagtctgtctgactgcagccctttgcttccaagtgacctcccgtactcctggtcgctgggatcaccaattctacatgaggttcaccgcatcactggatgaatggactgctggggcacgtgcagcatttgatggctctggccagaggttgtcccctcggaggctccggctcagtgtggggaatgtcacttgtgagcagctacacttccatgtgctggatacatcagattacctccggccagtggccttgactgtgacctttgccttggacaatactacaaagccagggcctgtgctgaatgagggctcacccacctctatacaaaagctggtccccttctcaaaggattgtggccctgacaatgaatgtgtcacagacctggtgcttcaagtgaatatggacatcagaggctccaggaaggccccatttgtggttcgaggtggccggcggaaagtgctggtatctacaactctggagaacagaaaggaaaatgcttacaatacgagcctgagtctcatcttctctagaaacctccacctggccagtctcactcctcagagagagagcccaataaaggtggaatgtgccgccccttctgctcatgcccggctctgcagtgtggggcatcctgtcttccagactggagccaaggtgacctttctgctagagtttgagtttagctgctcctctctcctgagccaggtcttcgtgaagctgactgccagcagtgacagcctggagagaaatgggacccttcaagataacacagcccagacctcagcctacatccaatatgagccccacctcctgttctctagtgagtctaccctgcaccgctatgaggttcacccatatgggaccctcccagtgggtcctggcccagaattcaaaaccactctcagggttcagaacctaggctgctatgtggtcagtggcctcatcatctcagccctccttccagctgtggcccatgggggcaattacttcctatcactgtctcaagtcatcactaacaatgcaagctgcatagtgcagaacctgactgaacccccaggcccacctgtgcatccagaggagcttcaacacacaaacagactgaatgggagcaatactcagtgtcaggtggtgaggtgccaccttgggcagctggcaaaggggactgaggtctctgttggactattgaggctggttcacaatgaatttttccgaagagccaagttcaagtccctgacggtggtcagcacctttgagctgggaaccgaagagggcagtgtcctacagctgactgaagcctcccgttggagtgagagcctcttggaggtggttcagacccggcctatcctcatctccctgtggatcctcataggcagtgtcctgggagggttgctcctgcttgctctccttgtcttctgcctgtggaagcttggcttctttgcccataagaaaatccctgaggaagaaaaaagagaagagaagttggagcaatgaatgtagaataagggtctagaaagtcctccctggcagcttcttcaagagacttgcataaaagcagaggtttgggggctcagatgggacaagaagccgcctctggactatctccccagaccagcagcctgacttgacttttgagtcctagggatgctgctggctagagatgaggctttacctcagacaagaagagctggcaccaaaactagccatgctcccaccctctgcttccctcctcctcgtgatcctggttccatagccaacactggggcttttgtttggggtccttttatccccaggaatcaataatttttttgcctaggtgcctgactcctttcagattccctctttatcttccctcacagtttggaaaggatgagggttatcttcctcgattcttccaccctctcactttcctgcctgttccccactccacaggagggagctgacgttggcttgaaaggagtaaagtcaacatctgctgctttcctgtggactctggtgattcatagagccggatggggagagtcaacaggaaaaaaggagggaggaggaaaagccacaagagacattctgtacaattccaaggaacagagaagcctttagacaggcaactgccatcccccctgaaacctgagacctgtagtgcactcgaccgccctcaggtgttggtgaaacagagctgcccccaggctcgctgggcataggcttcctgattccaagccttttctgggagcaaagccagggcctggtgcctgattttctgaagccaggagccctcaggtggctggagctggaatagcagggaggactgggtgtacctaggcagtattttctctacttctctcaagtcttatactcactcttgagccctccttggggcctgcttagaaagcagacaggagagagagtactgctacttgatgatgggaaatgctttcactttaccagctttgggaagcagcagccccatgggatctaaaagtgtggagtctgcattaagaaacctacatgggtggcatggggctctggggagcaagcccttacttgctcagcactggttatgtagcacaaatagctcctaggaaaatgtttctggggcaaccctagaaccctggtcatattttgcagggtttctctggtggaatcagtttgccagcccttgcttgatgcttactggaaatctccaggttaatttctatctctgatccctccccaacccactccatatttgggtcatggacagtaaaggcagttggattctcatagacaactgggtaacttatatttctttgtaatcaagacttgagatatcgaagtcagttattggtctccagagtgcagctctgggagccttttgaagaatcagcactcattaagagctgagaagagagaagacctgattgggtggttgactagcagtcacagaacctgtcctcccaggctgttcctgaggcctgaccacagtatttattttggcatgtctctggccttctgcagaggcccaccctcatgggcattgtctctgtttcccagtggggtggacagtatatcagatggtcagaacaaataaagttcagtgtcaaatgaaaaaaaaaaaaaaaaaaaa

SEQ ID NO: 696 - protein, 1036 aa, Homo sapiens
MNITHAYSQGHQKLNLDTVSYNMLGVDSDGCPTYMDVVIVLDGSNSIYPWSEVQTFLRRLVGKLFIDPEQIQVGLVQYGESPVHEWSLGDFRTKEEVVRAAKNLSRREGRETKTAQAIMVACTEGFSQSHGGRPEAARLLVVVTDGESHDGEELPAALKACEAGRVTRYGIAVLGHYLRRQRDPSSFLREIRTIASDPDERFFFNVTDEAALTDIVDALGDRIFGLEGSHAENESSFGLEMSQIGFSTHRLKDGILFGMVGAYDWGGSVLWLEGGHRLFPPRMALEDEFPPALQNHAAYLGYSVSSMLLRGGRRLFLSGAPRFRHRGKVIAFQLKKDGAVRVAQSLQGEQIGSYFGSELCPLDTDRDGTTDVLLVAAPMFLGPQNKETGRVYVYLVGQQSLLTLQGTLQPEPPQDARFGFAMGALPDLNQDGFADVAVGAPLEDGHQGALYLYHGTQSGVRPHPAQRIAAASMPHALSYFGRSVDGRLDLDGDDLVDVAVGAQGAAILLSSRPIVHLTPSLEVTPQAISVVQRDCRRRGQEAVCLTAALCFQVTSRTPGRWDHQFYMRFTASLDEWTAGARAAFDGSGQRLSPRRLRLSVGNVTCEQLHFHVLDTSDYLRPVALTVTFALDNTTKPGPVLNEGSPTSIQKLVPFSKDCGPDNECVTDLVLQVNMDIRGSRKAPFVVRGGRRKVLVSTTLENRKENAYNTSLSLIFSRNLHLASLTPQRESPIKVECAAPSAHARLCSVGHPVFQTGAKVTFLLEFEFSCSSLLSQVFVKLTASSDSLERNGTLQDNTAQTSAYIQYEPHLLFSSESTLHRYEVHPYGTLPVGPGPEFKTTLRVQNLGCYVVSGLIISALLPAVAHGGNYFLSLSQVITNNASCIVQNLTEPPGPPVHPEELQHTNRLNGSNTQCQVVRCHLGQLAKGTEVSVGLLRLVHNEFFRRAKFKSLTVVSTFELGTEEGSVLQLTEASRWSESLLEVVQTRPILISLWILIGSVLGGLLLLALLVFCLWKLGFFAHKKIPEEEKREEKLEQ

SEQ ID NO: 697 - DNA, 4859 bp, Homo sapiens
gttttccttggtctggggctccccacagttccccaccatcactcctcccattccttccaactttatttttagctgccattgggagggggcaggatgggagggaaagtgaagaaaacagaaaaggagagggacagaggccagaggacttctcatactggacagaaaccgatcaggcatggaactccccttcgtcactcacctgttcttgcccctggtgttcctgacaggctgcccaacatacatggatgttgtcattgtcttggatggctccaacagcatctacccctggtctgaagttcagaccttcctacgaagactggtagggaaactgtttattgacccagaacagatacaggtgggactggtacagtatggggagagccctgtacatgagtggtccctgggagatttccgaacgaaggaagaagtggtgagagcagcaaagaacctcagtcggcgggagggacgagaaacaaagactgcccaagcaataatggtggcctgcacagaagggttcagtcagtcccatgggggccgacccgaggctgccaggctactggtggttgtcactgatggagagtcccatgatggagaggagcttcctgcagcactaaaggcctgtgaggctggaagagtgacacgctatgggattgcagtccttggtcactacctccggcggcagcgagatcccagctctttcctgagagaaattagaactattgccagtgatccagatgagcgattcttcttcaatgtcacagatgaggctgctctgactgacattgtggatgcactaggagatcggatttttggccttgaagggtcccatgcagaaaacgaaagctcctttgggctggaaatgtctcagattggtttctccactcatcggctaaaggatgggattctttttgggatggtgggggcctatgactggggaggctctgtgctatggcttgaaggaggccaccgccttttccccccacgaatggcactggaagacgagttcccccctgcattgcagaaccatgcagcctacctgggttactctgtttcttccatgcttttgcggggtggacgccgcctgtttctctctggggctcctcgatttagacatcgaggaaaagtcatcgccttccagcttaagaaagatggggctgtgagggttgcccagagcctccagggggagcagattggttcatactttggcagtgagctctgcccattggatacagatagggatggaacaactgatgtcttacttgtggctgcccccatgttcctgggaccccagaacaaggaaacaggacgtgtttatgtgtatctggtaggccagcagtccttgctgaccctccaaggaacacttcagccagaacccccccaggatgctcggtttggctttgccatgggagctcttcctgatctgaaccaagatggttttgctgatgtggctgtgggggcgcctctggaagatgggcaccagggagcactgtacctgtaccatggaacccagagtggagtcaggccccatcctgcccagaggattgctgctgcctccatgccacatgccctcagctactttggccgaagtgtggatggtcggctagatctggatggagatgatctggtcgatgtggctgtgggtgcccagggggcagccatcctgctcagctcccggcccattgtccatctgaccccatcactggaggtgaccccacaggccatcagtgtggttcagagggactgtaggcggcgaggccaagaggcagtctgtctgactgcagccctttgcttccaagtgacctcccgtactcctggtcgctgggatcaccaattctacatgaggttcaccgcatcactggatgaatggactgctggggcacgtgcagcatttgatggctctggccagaggttgtcccctcggaggctccggctcagtgtggggaatgtcacttgtgagcagctacacttccatgtgctggatacatcagattacctccggccagtggccttgactgtgacctttgccttggacaatactacaaagccagggcctgtgctgaatgagggctcacccacctctatacaaaagctggtccccttctcaaaggattgtggccctgacaatgaatgtgtcacagacctggtgcttcaagtgaatatggacatcagaggctccaggaaggccccatttgtggttcgaggtggccggcggaaagtgctggtatctacaactctggagaacagaaaggaaaatgcttacaatacgagcctgagtctcatcttctctagaaacctccacctggccagtctcactcctcagagagagagcccaataaaggtggaatgtgccgccccttctgctcatgcccggctctgcagtgtggggcatcctgtcttccagactggagccaaggtgacctttctgctagagtttgagtttagctgctcctctctcctgagccaggtcttcgtgaagctgactgccagcagtgacagcctggagagaaatgggacccttcaagataacacagcccagacctcagcctacatccaatatgagccccacctcctgttctctagtgagtctaccctgcaccgctatgaggttcacccatatgggaccctcccagtgggtcctggcccagaattcaaaaccactctcagggttcagaacctaggctgctatgtggtcagtggcctcatcatctcagccctccttccagctgtggcccatgggggcaattacttcctatcactgtctcaagtcatcactaacaatgcaagctgcatagtgcagaacctgactgaacccccaggcccacctgtgcatccagaggagcttcaacacacaaacagactgaatgggagcaatactcagtgtcaggtggtgaggtgccaccttgggcagctggcaaaggggactgaggtctctgttggactattgaggctggttcacaatgaatttttccgaagagccaagttcaagtccctgacggtggtcagcacctttgagctgggaaccgaagagggcagtgtcctacagctgactgaagcctcccgttggagtgagagcctcttggaggtggttcagacccggcctatcctcatctccctgtggatcctcataggcagtgtcctgggagggttgctcctgcttgctctccttgtcttctgcctgtggaagcttggcttctttgcccataagaaaatccctgaggaagaaaaaagagaagagaagttggagcaatgaatgtagaataagggtctagaaagtcctccctggcagcttcttcaagagacttgcataaaagcagaggtttgggggctcagatgggacaagaagccgcctctggactatctccccagaccagcagcctgacttgacttttgagtcctagggatgctgctggctagagatgaggctttacctcagacaagaagagctggcaccaaaactagccatgctcccaccctctgcttccctcctcctcgtgatcctggttccatagccaacactggggcttttgtttggggtccttttatccccaggaatcaataatttttttgcctaggtgcctgactcctttcagattccctctttatcttccctcacagtttggaaaggatgagggttatcttcctcgattcttccaccctctcactttcctgcctgttccccactccacaggagggagctgacgttggcttgaaaggagtaaagtcaacatctgctgctttcctgtggactctggtgattcatagagccggatggggagagtcaacaggaaaaaaggagggaggaggaaaagccacaagagacattctgtacaattccaaggaacagagaagcctttagacaggcaactgccatcccccctgaaacctgagacctgtagtgcactcgaccgccctcaggtgttggtgaaacagagctgcccccaggctcgctgggcataggcttcctgattccaagccttttctgggagcaaagccagggcctggtgcctgattttctgaagccaggagccctcaggtggctggagctggaatagcagggaggactgggtgtacctaggcagtattttctctacttctctcaagtcttatactcactcttgagccctccttggggcctgcttagaaagcagacaggagagagagtactgctacttgatgatgggaaatgctttcactttaccagctttgggaagcagcagccccatgggatctaaaagtgtggagtctgcattaagaaacctacatgggtggcatggggctctggggagcaagcccttacttgctcagcactggttatgtagcacaaatagctcctaggaaaatgtttctggggcaaccctagaaccctggtcatattttgcagggtttctctggtggaatcagtttgccagcccttgcttgatgcttactggaaatctccaggttaatttctatctctgatccctccccaacccactccatatttgggtcatggacagtaaaggcagttggattctcatagacaactgggtaacttatatttctttgtaatcaagacttgagatatcgaagtcagttattggtctccagagtgcagctctgggagccttttgaagaatcagcactcattaagagctgagaagagagaagacctgattgggtggttgactagcagtcacagaacctgtcctcccaggctgttcctgaggcctgaccacagtatttattttggcatgtctctggccttctgcagaggcccaccctcatgggcattgtctctgtttcccagtggggtggacagtatatcagatggtcagaacaaataaagttcagtgtcaaatgaaaaaaaaaaaaaaaaaaaa

SEQ ID NO: 698 - protein, 1024 aa, Homo sapiens
MELPFVTHLFLPLVFLTGCPTYMDVVIVLDGSNSIYPWSEVQTFLRRLVGKLFIDPEQIQVGLVQYGESPVHEWSLGDFRTKEEVVRAAKNLSRREGRETKTAQAIMVACTEGFSQSHGGRPEAARLLVVVTDGESHDGEELPAALKACEAGRVTRYGIAVLGHYLRRQRDPSSFLREIRTIASDPDERFFFNVTDEAALTDIVDALGDRIFGLEGSHAENESSFGLEMSQIGFSTHRLKDGILFGMVGAYDWGGSVLWLEGGHRLFPPRMALEDEFPPALQNHAAYLGYSVSSMLLRGGRRLFLSGAPRFRHRGKVIAFQLKKDGAVRVAQSLQGEQIGSYFGSELCPLDTDRDGTTDVLLVAAPMFLGPQNKETGRVYVYLVGQQSLLTLQGTLQPEPPQDARFGFAMGALPDLNQDGFADVAVGAPLEDGHQGALYLYHGTQSGVRPHPAQRIAAASMPHALSYFGRSVDGRLDLDGDDLVDVAVGAQGAAILLSSRPIVHLTPSLEVTPQAISVVQRDCRRRGQEAVCLTAALCFQVTSRTPGRWDHQFYMRFTASLDEWTAGARAAFDGSGQRLSPRRLRLSVGNVTCEQLHFHVLDTSDYLRPVALTVTFALDNTTKPGPVLNEGSPTSIQKLVPFSKDCGPDNECVTDLVLQVNMDIRGSRKAPFVVRGGRRKVLVSTTLENRKENAYNTSLSLIFSRNLHLASLTPQRESPIKVECAAPSAHARLCSVGHPVFQTGAKVTFLLEFEFSCSSLLSQVFVKLTASSDSLERNGTLQDNTAQTSAYIQYEPHLLFSSESTLHRYEVHPYGTLPVGPGPEFKTTLRVQNLGCYVVSGLIISALLPAVAHGGNYFLSLSQVITNNASCIVQNLTEPPGPPVHPEELQHTNRLNGSNTQCQVVRCHLGQLAKGTEVSVGLLRLVHNEFFRRAKFKSLTVVSTFELGTEEGSVLQLTEASRWSESLLEVVQTRPILISLWILIGSVLGGLLLLALLVFCLWKLGFFAHKKIPEEEKREEKLEQ

SEQ ID NO: 699 - DNA, 3434 bp, Homo sapiens
gcccggaacgcccgcgggctaggccacaacggctcgggaaccgccgccggtatccgcgtccgcagcgccgccagccaggcgagagccgtgtgggatcccagcgcccgcactcccgcccccgccaaggagccaggaatggcacaactagagaggagcgccatctctggcttcagctctaagtccaggcgaaactcattcgcatatgatgttaagcgtgaagtatacaatgaggagacctttcaacaggaacacaaaaggaaggcctcctcttctgggaacatgaacatcaacatcaccaccttcagacaccacgtccagtgccgctgctcatggcacaggttcctacgatgcgtgcttacaatctttcccttcctagaatggatgtgtatgtatcgattaaaggattggcttctgggagacttacttgctggtataagtgttggccttgtgcaagttccccaaggcctgacacttagtttgctggcaaggcaactgattcctcctctcaacatcgcttatgcagctttctgttcttcggtaatctatgtaatttttggatcgtgtcatcaaatgtccattggttccttcttcctggtgagtgctctgctgatcaacgttctgaaagtgagcccattcaacaacggtcaactggtcatgggatctttcgtcaagaatgagttttcggccccctcctaccttatgggctataataaatccttgagtgtggtggcaaccacaacttttctgactgggattattcagctaataatgggcgtattgggtttgggcttcattgccacttaccttccggagtctgcaatgagtgcttacctggctgctgtggcacttcatatcatgctgtcccagctgactttcatctttgggattatgattagtttccatgccggtcccatctccttcttctatgacataattaattactgtgtagctctcccaaaagcgaattccaccagcattctagtatttctaactgttgttgttgctctgcgaatcaacaaatgtatcagaatttctttcaatcagtatcccattgagtttcccatggaattatttctgattattggcttcactgtgattgcaaacaagataagcatggccacagaaaccagccagacgcttattgacatgattccttatagctttctgcttcctgtaacaccagatttcagccttcttcccaagataattttacaagccttctccttatctttggtgagctcctttctgctcatatttctgggcaagaagattgccagtcttcacaattacagtgtcaattccaaccaggatttaatagccatcggcctttgcaatgtcgtcagttcatttttcagatcttgtgtgtttactggtgctattgctaggactattatccaggataaatctggaggaagacaacagtttgcatctctggtaggcgcaggtgtgatgctgctcctgatggtgaagatgggacactttttctacacactgccaaatgctgtgctggctggtattattctgagcaacgtcattccctaccttgaaaccatttctaacctacccagcctgtggaggcaggaccaatatgactgtgctctttggatgatgacattctcatcttcaattttcctgggactggacattggactaattatctcagtagtttctgctttcttcatcaccactgttcgttcacacagagctaagattcttctcctgggtcaaatccctaacaccaacatttatagaagcatcaatgattatcgggagatcatcaccattcctggggtgaaaatcttccagtgctgcagctcaattacatttgtaaatgtttactacctaaagcataagctgttaaaagaggttgatatggtaaaggtgcctcttaaagaagaagaaattttcagcttgtttaattcaagtgacaccaatctacaaggaggaaagatttgcaggtgtttctgcaactgtgatgatctggagccgctgcccaggattctttacacagagcgatttgaaaataaactggatcccgaagcatcctccattaacctgattcactgctcacattttgagagcatgaacacaagccaaactgcatccgaagaccaagtgccatacacagtatcgtccgtgtctcagaaaaatcaagggcaacagtatgaggaggtggaggaagtttggcttcctaataactcatcaagaaacagctcaccaggactgcctgatgtggcggaaagccaggggaggagatcactcatcccttactcagatgcgtctctactgcccagtgtccacaccatcatcctggatttctccatggtacactacgtggattcacgggggttagtcgtattaagacagatatgcaatgcctttcaaaacgccaacattttgatactcattgcagggtgtcactcttccatagtcagggcatttgagaggaatgatttctttgacgctggcatcaccaagacccagctgttcctcagcgttcacgacgccgtgctgtttgccttgtcaaggaaggtcataggctcctctgagttaagcatcgatgaatccgagacagtgatacgggaaacctactcagaaacagacaagaatgacaattcaagatataaaatgagcagcagttttctaggaagccaaaaaaatgtaagtccaggcttcatcaagatccaacagcctgtagaagaggagtcggagttggatttggagctggaatcagaacaagaggctgggctgggtctggacctagacctggatcgggagctggagcctgaaatggagcccaaggctgagaccgagaccaagacccagaccgagatggagccccagcctgagactgagcctgagatggagcccaaccccaaatctaggccaagagctcacacttttcctcagcagcgttactggcctatgtatcatccgtctatggcttccacccagtctcagactcagactcggacatggtcagtggagaggagacgccatcctatggattcatactcaccagagggcaacagcaatgaagatgtctaggagatgaactagaaataaggggtcagataatgctggcaaatcctcctacccaaaaaggggtcaattgtccagagacctagactggatacgaactagcagtacttccttcctgactgtgactcctactacctgccagccttcttccttgctctgcgctgggatcatactcccaaatcacattactaaatgccaacaattatctctgaattccctatccaggctcccctcatttcaccttcagcatatattctagtcatgaatttccttcttcacacaccccacatctctgggctttgtgccagaccatctctaacttaatcctctcatccctgttcccctttctccaaagagatgaagctcaaataaaatgtataactctagtaaca

SEQ ID NO: 700 - protein, 970 aa, Homo sapiens
MAQLERSAISGFSSKSRRNSFAYDVKREVYNEETFQQEHKRKASSSGNMNINITTFRHHVQCRCSWHRFLRCVLTIFPFLEWMCMYRLKDWLLGDLLAGISVGLVQVPQGLTLSLLARQLIPPLNIAYAAFCSSVIYVIFGSCHQMSIGSFFLVSALLINVLKVSPFNNGQLVMGSFVKNEFSAPSYLMGYNKSLSVVATTTFLTGIIQLIMGVLGLGFIATYLPESAMSAYLAAVALHIMLSQLTFIFGIMISFHAGPISFFYDIINYCVALPKANSTSILVFLTVVVALRINKCIRISFNQYPIEFPMELFLIIGFTVIANKISMATETSQTLIDMIPYSFLLPVTPDFSLLPKIILQAFSLSLVSSFLLIFLGKKIASLHNYSVNSNQDLIAIGLCNVVSSFFRSCVFTGAIARTIIQDKSGGRQQFASLVGAGVMLLLMVKMGHFFYTLPNAVLAGIILSNVIPYLETISNLPSLWRQDQYDCALWMMTFSSSIFLGLDIGLIISVVSAFFITTVRSHRAKILLLGQIPNTNIYRSINDYREIITIPGVKIFQCCSSITFVNVYYLKHKLLKEVDMVKVPLKEEEIFSLFNSSDTNLQGGKICRCFCNCDDLEPLPRILYTERFENKLDPEASSINLIHCSHFESMNTSQTASEDQVPYTVSSVSQKNQGQQYEEVEEVWLPNNSSRNSSPGLPDVAESQGRRSLIPYSDASLLPSVHTIILDFSMVHYVDSRGLVVLRQICNAFQNANILILIAGCHSSIVRAFERNDFFDAGITKTQLFLSVHDAVLFALSRKVIGSSELSIDESETVIRETYSETDKNDNSRYKMSSSFLGSQKNVSPGFIKIQQPVEEESELDLELESEQEAGLGLDLDLDRELEPEMEPKAETETKTQTEMEPQPETEPEMEPNPKSRPRAHTFPQQRYWPMYHPSMASTQSQTQTRTWSVERRRHPMDSYSPEGNSNEDV

SEQ ID NO: 701 - DNA, 3157 bp, Homo sapiens
agccgctgctgggagacgcctgggcgccgggggctgcaggtcccagggcgggggctgcgtccgtcaccggcaggtacccaggtatgccgcagagccaggcacgccgtgggcactcagtcagtatctgtggaatgaatgaatgatggtcgtccctgggagcttatctctgaggaatggcacaactagagaggagcgccatctctggcttcagctctaagtccaggcgaaactcattcgcatatgatgttaagcgtgaagtatacaatgaggagacctttcaacaggaacacaaaaggaaggcctcctcttctgggaacatgaacatcaacatcaccaccttcagacaccacgtccagtgccgctgctcatggcacaggttcctacgatgcgtgcttacaatctttcccttcctagaatggatgtgtatgtatcgattaaaggattggcttctgggagacttacttgctggtataagtgttggccttgtgcaagttccccaaggcctgacacttagtttgctggcaaggcaactgattcctcctctcaacatcgcttatgcagctttctgttcttcggtaatctatgtaatttttggatcgtgtcatcaaatgtccattggttccttcttcctggtgagtgctctgctgatcaacgttctgaaagtgagcccattcaacaacggtcaactggtcatgggatctttcgtcaagaatgagttttcggccccctcctaccttatgggctataataaatccttgagtgtggtggcaaccacaacttttctgactgggattattcagattattggcttcactgtgattgcaaacaagataagcatggccacagaaaccagccagacgcttattgacatgattccttatagctttctgcttcctgtaacaccagatttcagccttcttcccaagataattttacaagccttctccttatctttggtgagctcctttctgctcatatttctgggcaagaagattgccagtcttcacaattacagtgtcaattccaaccaggatttaatagccatcggcctttgcaatgtcgtcagttcatttttcagatcttgtgtgtttactggtgctattgctaggactattatccaggataaatctggaggaagacaacagtttgcatctctggtaggcgcaggtgtgatgctgctcctgatggtgaagatgggacactttttctacacactgccaaatgctgtgctggctggtattattctgagcaacgtcattccctaccttgaaaccatttctaacctacccagcctgtggaggcaggaccaatatgactgtgctctttggatgatgacattctcatcttcaattttcctgggactggacattggactaattatctcagtagtttctgctttcttcatcaccactgttcgttcacacagagctaagattcttctcctgggtcaaatccctaacaccaacatttatagaagcatcaatgattatcgggagatcatcaccattcctggggtgaaaatcttccagtgctgcagctcaattacatttgtaaatgtttactacctaaagcataagctgttaaaagaggttgatatggtaaaggtgcctcttaaagaagaagaaattttcagcttgtttaattcaagtgacaccaatctacaaggaggaaagatttgcaggtgtttctgcaactgtgatgatctggagccgctgcccaggattctttacacagagcgatttgaaaataaactggatcccgaagcatcctccattaacctgattcactgctcacattttgagagcatgaacacaagccaaactgcatccgaagaccaagtgccatacacagtatcgtccgtgtctcagaaaaatcaagggcaacagtatgaggaggtggaggaagtttggcttcctaataactcatcaagaaacagctcaccaggactgcctgatgtggcggaaagccaggggaggagatcactcatcccttactcagatgcgtctctactgcccagtgtccacaccatcatcctggatttctccatggtacactacgtggattcacgggggttagtcgtattaagacagatatgcaatgcctttcaaaacgccaacattttgatactcattgcagggtgtcactcttccatagtcagggcatttgagaggaatgatttctttgacgctggcatcaccaagacccagctgttcctcagcgttcacgacgccgtgctgtttgccttgtcaaggaaggtcataggctcctctgagttaagcatcgatgaatccgagacagtgatacgggaaacctactcagaaacagacaagaatgacaattcaagatataaaatgagcagcagttttctaggaagccaaaaaaatgtaagtccaggcttcatcaagatccaacagcctgtagaagaggagtcggagttggatttggagctggaatcagaacaagaggctgggctgggtctggacctagacctggatcgggagctggagcctgaaatggagcccaaggctgagaccgagaccaagacccagaccgagatggagccccagcctgagactgagcctgagatggagcccaaccccaaatctaggccaagagctcacacttttcctcagcagcgttactggcctatgtatcatccgtctatggcttccacccagtctcagactcagactcggacatggtcagtggagaggagacgccatcctatggattcatactcaccagagggcaacagcaatgaagatgtctaggagatgaactagaaataaggggtcagataatgctggcaaatcctcctacccaaaaaggggtcaattgtccagagacctagactggatacgaactagcagtacttccttcctgactgtgactcctactacctgccagccttcttccttgctctgcgctgggatcatactcccaaatcacattactaaatgccaacaattatctctgaattccctatccaggctcccctcatttcaccttcagcatatattctagtcatgaatttccttcttcacacaccccacatctctgggctttgtgccagaccatctctaacttaatcctctcatccctgttcccctttctccaaagagatgaagctcaaataaaatgtataactctagtaaca

SEQ ID NO: 702 - protein, 865 aa, Homo sapiens
MAQLERSAISGFSSKSRRNSFAYDVKREVYNEETFQQEHKRKASSSGNMNINITTFRHHVQCRCSWHRFLRCVLTIFPFLEWMCMYRLKDWLLGDLLAGISVGLVQVPQGLTLSLLARQLIPPLNIAYAAFCSSVIYVIFGSCHQMSIGSFFLVSALLINVLKVSPFNNGQLVMGSFVKNEFSAPSYLMGYNKSLSVVATTTFLTGIIQIIGFTVIANKISMATETSQTLIDMIPYSFLLPVTPDFSLLPKIILQAFSLSLVSSFLLIFLGKKIASLHNYSVNSNQDLIAIGLCNVVSSFFRSCVFTGAIARTIIQDKSGGRQQFASLVGAGVMLLLMVKMGHFFYTLPNAVLAGIILSNVIPYLETISNLPSLWRQDQYDCALWMMTFSSSIFLGLDIGLIISVVSAFFITTVRSHRAKILLLGQIPNTNIYRSINDYREIITIPGVKIFQCCSSITFVNVYYLKHKLLKEVDMVKVPLKEEEIFSLFNSSDTNLQGGKICRCFCNCDDLEPLPRILYTERFENKLDPEASSINLIHCSHFESMNTSQTASEDQVPYTVSSVSQKNQGQQYEEVEEVWLPNNSSRNSSPGLPDVAESQGRRSLIPYSDASLLPSVHTIILDFSMVHYVDSRGLVVLRQICNAFQNANILILIAGCHSSIVRAFERNDFFDAGITKTQLFLSVHDAVLFALSRKVIGSSELSIDESETVIRETYSETDKNDNSRYKMSSSFLGSQKNVSPGFIKIQQPVEEESELDLELESEQEAGLGLDLDLDRELEPEMEPKAETETKTQTEMEPQPETEPEMEPNPKSRPRAHTFPQQRYWPMYHPSMASTQSQTQTRTWSVERRRHPMDSYSPEGNSNEDV

SEQ ID NO: 703 - DNA, 3410 bp, Homo sapiens
actcccgcccccgccaaggagccaggtgagccgctgctgggagacgcctgggcgccgggggctgcaggtcccagggcgggggctgcgtccgtcaccggcaggtacccaggaatggcacaactagagaggagcgccatctctggcttcagctctaagtccaggcgaaactcattcgcatatgatgttaagcgtgaagtatacaatgaggagacctttcaacaggaacacaaaaggaaggcctcctcttctgggaacatgaacatcaacatcaccaccttcagacaccacgtccagtgccgctgctcatggcacaggttcctacgatgcgtgcttacaatctttcccttcctagaatggatgtgtatgtatcgattaaaggattggcttctgggagacttacttgctggtataagtgttggccttgtgcaagttccccaaggcctgacacttagtttgctggcaaggcaactgattcctcctctcaacatcgcttatgcagctttctgttcttcggtaatctatgtaatttttggatcgtgtcatcaaatgtccattggttccttcttcctggtgagtgctctgctgatcaacgttctgaaagtgagcccattcaacaacggtcaactggtcatgggatctttcgtcaagaatgagttttcggccccctcctaccttatgggctataataaatccttgagtgtggtggcaaccacaacttttctgactgggattattcagctaataatgggcgtattgggtttgggcttcattgccacttaccttccggagtctgcaatgagtgcttacctggctgctgtggcacttcatatcatgctgtcccagctgactttcatctttgggattatgattagtttccatgccggtcccatctccttcttctatgacataattaattactgtgtagctctcccaaaagcgaattccaccagcattctagtatttctaactgttgttgttgctctgcgaatcaacaaatgtatcagaatttctttcaatcagtatcccattgagtttcccatggaattatttctgattattggcttcactgtgattgcaaacaagataagcatggccacagaaaccagccagacgcttattgacatgattccttatagctttctgcttcctgtaacaccagatttcagccttcttcccaagataattttacaagccttctccttatctttggtgagctcctttctgctcatatttctgggcaagaagattgccagtcttcacaattacagtgtcaattccaaccaggatttaatagccatcggcctttgcaatgtcgtcagttcatttttcagatcttgtgtgtttactggtgctattgctaggactattatccaggataaatctggaggaagacaacagtttgcatctctggtaggcgcaggtgtgatgctgctcctgatggtgaagatgggacactttttctacacactgccaaatgctgtgctggctggtattattctgagcaacgtcattccctaccttgaaaccatttctaacctacccagcctgtggaggcaggaccaatatgactgtgctctttggatgatgacattctcatcttcaattttcctgggactggacattggactaattatctcagtagtttctgctttcttcatcaccactgttcgttcacacagagctaagattcttctcctgggtcaaatccctaacaccaacatttatagaagcatcaatgattatcgggagatcatcaccattcctggggtgaaaatcttccagtgctgcagctcaattacatttgtaaatgtttactacctaaagcataagctgttaaaagaggttgatatggtaaaggtgcctcttaaagaagaagaaattttcagcttgtttaattcaagtgacaccaatctacaaggaggaaagatttgcaggtgtttctgcaactgtgatgatctggagccgctgcccaggattctttacacagagcgatttgaaaataaactggatcccgaagcatcctccattaacctgattcactgctcacattttgagagcatgaacacaagccaaactgcatccgaagaccaagtgccatacacagtatcgtccgtgtctcagaaaaatcaagggcaacagtatgaggaggtggaggaagtttggcttcctaataactcatcaagaaacagctcaccaggactgcctgatgtggcggaaagccaggggaggagatcactcatcccttactcagatgcgtctctactgcccagtgtccacaccatcatcctggatttctccatggtacactacgtggattcacgggggttagtcgtattaagacagatatgcaatgcctttcaaaacgccaacattttgatactcattgcagggtgtcactcttccatagtcagggcatttgagaggaatgatttctttgacgctggcatcaccaagacccagctgttcctcagcgttcacgacgccgtgctgtttgccttgtcaaggaaggtcataggctcctctgagttaagcatcgatgaatccgagacagtgatacgggaaacctactcagaaacagacaagaatgacaattcaagatataaaatgagcagcagttttctaggaagccaaaaaaatgtaagtccaggcttcatcaagatccaacagcctgtagaagaggagtcggagttggatttggagctggaatcagaacaagaggctgggctgggtctggacctagacctggatcgggagctggagcctgaaatggagcccaaggctgagaccgagaccaagacccagaccgagatggagccccagcctgagactgagcctgagatggagcccaaccccaaatctaggccaagagctcacacttttcctcagcagcgttactggcctatgtatcatccgtctatggcttccacccagtctcagactcagactcggacatggtcagtggagaggagacgccatcctatggattcatactcaccagagggcaacagcaatgaagatgtctaggagatgaactagaaataaggggtcagataatgctggcaaatcctcctacccaaaaaggggtcaattgtccagagacctagactggatacgaactagcagtacttccttcctgactgtgactcctactacctgccagccttcttccttgctctgcgctgggatcatactcccaaatcacattactaaatgccaacaattatctctgaattccctatccaggctcccctcatttcaccttcagcatatattctagtcatgaatttccttcttcacacaccccacatctctgggctttgtgccagaccatctctaacttaatcctctcatccctgttcccctttctccaaagagatgaagctcaaataaaatgtataactctagtaaca

SEQ ID NO: 704 - protein, 970 aa, Homo sapiens; identical to SEQ ID NO: 700

SEQ ID NO: 705 - DNA, 1843 bp, Homo sapiens
cacaatccagaagcaggttactgcttcactccatcgcagccacttcctcttgaactaagggaggcagggcttgtcttctctcctcagagcagagtctgcgatcttcccagcacagacgtttggacagagcaggctcctaaggtctccagaatgcccgtgccagcctcctggccccaccttcctagtcctttcctgctgatgacgctactgctggggagactcacaggagtggcaggtgaggacgagctacaggtgattcagcctgaaaagtccgtatcagttgcagctggagagtcggccactctgcgctgtgctatgacgtccctgatccctgtggggcccatcatgtggtttagaggagctggagcaggccgggaattaatctacaatcagaaagaaggccacttcccacgggtaacaactgtttcagaactcacaaagagaaacaacctggacttttccatcagcatcagtaacatcaccccagcagacgccggcacctactactgtgtgaagttccggaaagggagccctgacgacgtggagtttaagtctggagcaggcactgagctgtctgtgcgcgaagcagcgctggctcctactgctccactcctcgtagctctcctcctgggccccaagctgctactggtggttggtgtctctgccatctacatctgctggaaacagaaggcctgactgaccctcagtctctgctgcctcctcctttcttgagaagctcagcctgagagaaggagctggcgagaaccttccccacactcagctccaaacgcctcctctcccaggtcatctgcctgcccacacgctcctgttccaccttcacaagaccatgatgccccaaagcagtgtctctattcacggtcctgagcaggggccatgggattgggctctgggcactgactcatggcacctccctagaaggtgagaaacactccaaatctaaacacaccaggacttctcccatccgtcgccttgggactggccataaaccacagactctctccaggctctcaagagttatcctgtcttctggattcctgcctaccccaactcccccagccttgttgaggttctctactgcctcctgaatacacatgaacccctataccaattttaagaaaaaaatgattctctttcctctttgtccaagcatcctatccctcaaacccaaaaagaaagaagctctcccttctctctctgtgatggagacagtatttcttctagtatcctgcagccttcccagtcctgctgcttgtggtagaaatgctgccacagcccaacattgaggagccctcgatgactgccctttacaactcatattcagttctgcctccaaaatgcatgtgtccacttacatgagatggtaaatgtttaacaatggactttctgaaagggaaaaaccaaaagctgttttgcagtgcttgccaatttctctagtgtaataactcccaacctgaccaatttcacactgccaacagttaaacaaccagattgcaagattcctgaaatttaacaattggttttcagggcccagtccaagcctgctgctggaaacctcagagttaaatccctattctccacacctctcacctccaccacccctccctgtcccagccagcatcatctctttggggaccactcctctggctttcatttttcagccacagtgattctttggaaaagtcaaatcatatcacttctctgcttcttccccaacacagctgcatggctcccgctctccctccttcaagtctctgctcaatgtcacttcattaaaggcaccttctataaactaaaaaaaaaaaaaaaaaaaaaaaaaaaaaaa

SEQ ID NO: 706 - protein, 181 aa, Homo sapiens
MPVPASWPHLPSPFLLMTLLLGRLTGVAGEDELQVIQPEKSVSVAAGESATLRCAMTSLIPVGPIMWFRGAGAGRELIYNQKEGHFPRVTTVSELTKRNNLDFSISISNITPADAGTYYCVKFRKGSPDDVEFKSGAGTELSVREAALAPTAPLLVALLLGPKLLLVVGVSAIYICWKQKA

SEQ ID NO: 707 - DNA, 2308 bp, Homo sapiens
cacaatccagaagcaggttactgcttcactccatcgcagccacttcctcttgaactaagggaggcagggcttgtcttctctcctcagagcagagtctgcgatcttcccagcacagacgtttggacagagcaggctcctaaggtctccagaatgcccgtgccagcctcctggccccaccttcctagtcctttcctgctgatgacgctactgctggggagactcacaggggtagctggcgaggaagagctgcaggtgattcagcctgacaagtccatatcagttgcagctggagagtcggccactctgcactgcactgtgacttccctgatccctgtggggcccatccagtggttcagaggagctggaccaggccgggaattaatctacaatcagaaagaaggccacttcccacgggtaacaactgtttcagacctcacaaagagaaacaacatggacttttccatccgcatcagtaacatcaccccagcagatgccggcacctactactgtgtgaagttccggaaagggagccccgaccacgtggagtttaagtctggagcaggcaccgagctgtctgtgcgtgccaaaccctctgcccccgtggtatcgggccctgcggcgagggccacacctcagcacacagtgagcttcacctgcgagtcccacggcttctcacccagagacatcaccctgaaatggttcaaaaatgggaatgagctctcagacttccagaccaacgtggaccccgcaggagacagtgtgtcctacagcatccacagcacagccaaggtggtgctgacccgcgaggacgttcactctcaagtcatctgcgaggtggcccacgtcaccttgcagggggaccctcttcgtgggactgccaacttgtctgagaccatccgagttccacccaccttggaggttactcaacagcccgtgagggcagagaaccaggtgaatgtcacctgccaggtgaggaagttctacccccagagactacagctgacctggttggagaatggaaacgtgtccaggacagaaacggcctcaacccttacagaaaacaaggatggtacctacaactggatgagctggctcctggtgaatgtatctgcccacagggatgatgtgaagctcacctgccaggtggagcatgacgggcagccagcggtcagcaaaagccatgacctgaaggtctcagcccacccgaaggagcagggctcaaatactgctcctggcccagcactggcttctgctgctccacttctcatagctttcctcctgggccccaaggtgctgctggtggttggtgtctctgtcatctatgtctactggaagcagaaggcctgactgcatcccagaaggagaccagcaccaggaatacaacagcctcccaggaaatgtttcttaaatgatgagcagatgattaaatatggacatgttacccacagctccttccctcctcccctgccacatggaacccccagtctctcctgcctacttccttccttgaatggctctgactgagagaaggggctggtgagaagcttccccagactgagctccaaacacctcccctcccaggacatcttcctgcccacaggctcctgttgctcctttgcagagtccttgattctccagagcagtcttcattcatggtcctgagcagaggccatgggatggggctctggggagtgactcatgacacctccctaggatgtgggaaacacgccaaatctaaacacatcaggacacctctcctccatcgtcttggactctccgtaagccacaaactgcagtccagattctcaagagttattctgccttctggattcctgcctacccaattacccagccttgttgagattctctattgcctcctgaatacaaattaacactcatcctggttttaaggagaaaaatgattatccttcctctttgtttatacgtatgatataatttggatattttttccctacaaatctcaatgtgaaatttcatcccctatgttggaggtggggtcaggtgggaggtgtttgggtcatggggatggattcatcatgaatgacttggtgttatcttggtctattagcacccacaagatctgattgtttaaaagtgcctagcagctccctcttctctttttctcttcctctctccccatgttatgccaactccacttcactgtccactgtgagcagaagcactctgaggccctcagcagcagatgcaagtaccatgcttcttgtacagtctgcagaaccaaaagccaaataaacctctctttataaattaaaaaaaaaaaaaaaaa

SEQ ID NO: 708 - protein, 398 aa, Homo sapiens
MPVPASWPHLPSPFLLMTLLLGRLTGVAGEEELQVIQPDKSISVAAGESATLHCTVTSLIPVGPIQWFRGAGPGRELIYNQKEGHFPRVTTVSDLTKRNNMDFSIRISNITPADAGTYYCVKFRKGSPDHVEFKSGAGTELSVRAKPSAPVVSGPAARATPQHTVSFTCESHGFSPRDITLKWFKNGNELSDFQTNVDPAGDSVSYSIHSTAKVVLTREDVHSQVICEVAHVTLQGDPLRGTANLSETIRVPPTLEVTQQPVRAENQVNVTCQVRKFYPQRLQLTWLENGNVSRTETASTLTENKDGTYNWMSWLLVNVSAHRDDVKLTCQVEHDGQPAVSKSHDLKVSAHPKEQGSNTAPGPALASAAPLLIAFLLGPKVLLVVGVSVIYVYWKQKA

SEQ ID NO: 709 - DNA, 2209 bp, Homo sapiens
cacaatccagaagcaggttactgcttcactccatcgcagccacttcctcttgaactaagggaggcagggcttgtcttctctcctcagagcagagtctgcgatcttcccagcacagacgtttggacagagcaggctcctaaggtctccagaatgcccgtgccagcctcctggccccaccttcctagtcctttcctgctgatgacgctactgctggggagactcacaggggtagctggcgaggaagagctgcaggtgattcagcctgacaagtccatatcagttgcagctggagagtcggccactctgcactgcactgtgacttccctgatccctgtggggcccatccagtggttcagaggagctggaccaggccgggaattaatctacaatcagaaagaaggccacttcccacgggtaacaactgtttcagacctcacaaagagaaacaacatggacttttccatccgcatcagtaacatcaccccagcagatgccggcacctactactgtgtgaagttccggaaagggagccccgaccacgtggagtttaagtctggagcaggcaccgagctgtctgtgcgtgccaaaccctctgcccccgtggtatcgggccctgcggcgagggccacacctcagcacacagtgagcttcacctgcgagtcccacggcttctcacccagagacatcaccctgaaatggttcaaaaatgggaatgagctctcagacttccagaccaacgtggaccccgcaggagacagtgtgtcctacagcatccacagcacagccaaggtggtgctgacccgcgaggacgttcactctcaagtcatctgcgaggtggcccacgtcaccttgcagggggaccctcttcgtgggactgccaacttgtctgagaccatccgagttccacccaccttggaggttactcaacagcccgtgagggcagagaaccaggtgaatgtcacctgccaggtgaggaagttctacccccagagactacagctgacctggttggagaatggaaacgtgtccaggacagaaacggcctcaacccttacagaaaacaaggatggtacctacaactggatgagctggctcctggtgaatgtatctgcccacagggatgatgtgaagctcacctgccaggtggagcatgacgggcagccagcggtcagcaaaagccatgacctgaaggtctcagcccacccgaaggagcagggctcaaatactgctcctggcccagcactggcttctgctgctccacttctcatagctttcctcctgggccccaaggtgctgctggtggttggtgtctctgtcatctatgtctactggaagcagaaggcctgactctccttccctcctcccctgccacatggaacccccagtctctcctgcctacttccttccttgaatggctctgactgagagaaggggctggtgagaagcttccccagactgagctccaaacacctcccctcccaggacatcttcctgcccacaggctcctgttgctcctttgcagagtccttgattctccagagcagtcttcattcatggtcctgagcagaggccatgggatggggctctggggagtgactcatgacacctccctaggatgtgggaaacacgccaaatctaaacacatcaggacacctctcctccatcgtcttggactctccgtaagccacaaactgcagtccagattctcaagagttattctgccttctggattcctgcctacccaattacccagccttgttgagattctctattgcctcctgaatacaaattaacactcatcctggttttaaggagaaaaatgattatccttcctctttgtttatacgtatgatataatttggatattttttccctacaaatctcaatgtgaaatttcatcccctatgttggaggtggggtcaggtgggaggtgtttgggtcatggggatggattcatcatgaatgacttggtgttatcttggtctattagcacccacaagatctgattgtttaaaagtgcctagcagctccctcttctctttttctcttcctctctccccatgttatgccaactccacttcactgtccactgtgagcagaagcactctgaggccctcagcagcagatgcaagtaccatgcttcttgtacagtctgcagaaccaaaagccaaataaacctctctttataaattaaaaaaaaaaaaaaaaa

SEQ ID NO: 710 - protein, 398 aa, Homo sapiens; identical to SEQ ID NO: 708

SEQ ID NO: 711 - DNA, 1755 bp, Homo sapiens
agagcagagcctgacatctccccaccacagacgtttgaacagagcaggctcctgaggtctccaggatgcctgtcccagcctcctggccccaccctccttgtcctttcctgctgctgactctattgctgggactcacaggagtggcaggtgaggacgagctacaggtgattcagcctgaaaagtccgtatcagttgcagctggagagtcggccactctgcgctgtgctatgacgtccctgatccctgtggggcccatcatgtggtttagaggagctggagcaggccgggaattaatctacaatcagaaagaaggccacttcccacgggtaacaactgtttcagaactcacaaagagaaacaacctggacttttccatcagcatcagtaacatcaccccagcagacgccggcacctactactgtgtgaagttccggaaagggagccctgacgacgtggagtttaagtctggagcaggcactgagctgtctgtgcgcgaagcagcgctggctcctactgctccactcctcgtagctctcctcctgggccccaagctgctactggtggttggtgtctctgccatctacatctgctggaaacagaaggcctgactgaccctcagtctctgctgcctcctcctttcttgagaagctcagcctgagagaaggagctggcgagaaccttccccacactcagctccaaacgcctcctctcccaggtcatctgcctgcccacacgctcctgttccaccttcacaagaccatgatgccccaaagcagtgtctctattcacggtcctgagcaggggccatgggattgggctctgggcactgactcatggcacctccctagaaggtgagaaacactccaaatctaaacacaccaggacttctcccatccgtcgccttgggactggccataaaccacagactctctccaggctctcaagagttatcctgtcttctggattcctgcctaccccaactcccccagccttgttgaggttctctactgcctcctgaatacacatgaacccctataccaattttaagaaaaaaatgattctctttcctctttgtccaagcatcctatccctcaaacccaaaaagaaagaagctctcccttctctctctgtgatggagacagtatttcttctagtatcctgcagccttcccagtcctgctgcttgtggtagaaatgctgccacagcccaacattgaggagccctcgatgactgccctttacaactcatattcagttctgcctccaaaatgcatgtgtccacttacatgagatggtaaatgtttaacaatggactttctgaaagggaaaaaccaaaagctgttttgcagtgcttgccaatttctctagtgtaataactcccaacctgaccaatttcacactgccaacagttaaacaaccagattgcaagattcctgaaatttaacaattggttttcagggcccagtccaagcctgctgctggaaacctcagagttaaatccctattctccacacctctcacctccaccacccctccctgtcccagccagcatcatctctttggggaccactcctctggctttcatttttcagccacagtgattctttggaaaagtcaaatcatatcacttctctgcttcttccccaacacagctgcatggctcccgctctccctccttcaagtctctgctcaatgtcacttcattaaaggcaccttctataaactaaaaaaaaaaaaaaaaaaaaaaaaaaaaaaa

SEQ ID NO: 712 - protein, 180 aa, Homo sapiens
MPVPASWPHPPCPFLLLTLLLGLTGVAGEDELQVIQPEKSVSVAAGESATLRCAMTSLIPVGPIMWFRGAGAGRELIYNQKEGHFPRVTTVSELTKRNNLDFSISISNITPADAGTYYCVKFRKGSPDDVEFKSGAGTELSVREAALAPTAPLLVALLLGPKLLLVVGVSAIYICWKQKA

SEQ ID NO: 713 - DNA, 2494 bp, Homo sapiens
cacaatccagaagcaggttactgcttcactccatcgcagccacttcctcttgaactaagggaggcagggcttgtcttctctcctcagagcagagtctgcgatcttcccagcacagacgtttggacagagcaggctcctaaggtctccagaatgcccgtgccagcctcctggccccaccttcctagtcctttcctgctgatgacgctactgctggggagactcacaggagtggcaggtgaggacgagctacaggtgattcagcctgaaaagtccgtatcagttgcagctggagagtcggccactctgcgctgtgctatgacgtccctgatccctgtggggcccatcatgtggtttagaggagctggagcaggccgggaattaatctacaatcagaaagaaggccacttcccacgggtaacaactgtttcagaactcacaaagagaaacaacctggacttttccatcagcatcagtaacatcaccccagcagacgccggcacctactactgtgtgaagttccggaaagggagccctgacgacgtggagtttaagtctggagcaggcactgagctgtctgtgcgcgccaaaccctctgcccccgtggtatcgggccctgcggtgagggccacacctgagcacacagtgagcttcacctgcgagtcccatggcttctctcccagagacatcaccctgaaatggttcaaaaatgggaatgagctctcagacttccagaccaacgtggaccccgcaggagacagtgtgtcctacagcatccacagcacagccagggtggtgctgacccgtggggacgttcactctcaagtcatctgcgagatagcccacatcaccttgcagggggaccctcttcgtgggactgccaacttgtctgaggccatccgagttccacccaccttggaggttactcaacagcccatgagggcagagaaccaggcaaacgtcacctgccaggtgagcaatttctacccccggggactacagctgacctggttggagaatggaaatgtgtcccggacagaaacagcttcgaccctcatagagaacaaggatggcacctacaactggatgagctggctcctggtgaacacctgtgcccacagggacgatgtggtgctcacctgtcaggtggagcatgatgggcagcaagcagtcagcaaaagctatgccctggagatctcagcgcaccagaaggagcacggctcagatatcacccatgaagcagcgctggctcctactgctccactcctcgtagctctcctcctgggccccaagctgctactggtggttggtgtctctgccatctacatctgctggaaacagaaggcctgactgaccctcagtctctgctgcctcctcctttcttgagaagctcagcctgagagaaggagctggcgagaaccttccccacactcagctccaaacgcctcctctcccaggtcatctgcctgcccacacgctcctgttccaccttcacaagaccatgatgccccaaagcagtgtctctattcacggtcctgagcaggggccatgggattgggctctgggcactgactcatggcacctccctagaaggtgagaaacactccaaatctaaacacaccaggacttctcccatccgtcgccttgggactggccataaaccacagactctctccaggctctcaagagttatcctgtcttctggattcctgcctaccccaactcccccagccttgttgaggttctctactgcctcctgaatacacatgaacccctataccaattttaagaaaaaaatgattctctttcctctttgtccaagcatcctatccctcaaacccaaaaagaaagaagctctcccttctctctctgtgatggagacagtatttcttctagtatcctgcagccttcccagtcctgctgcttgtggtagaaatgctgccacagcccaacattgaggagccctcgatgactgccctttacaactcatattcagttctgcctccaaaatgcatgtgtccacttacatgagatggtaaatgtttaacaatggactttctgaaagggaaaaaccaaaagctgttttgcagtgcttgccaatttctctagtgtaataactcccaacctgaccaatttcacactgccaacagttaaacaaccagattgcaagattcctgaaatttaacaattggttttcagggcccagtccaagcctgctgctggaaacctcagagttaaatccctattctccacacctctcacctccaccacccctccctgtcccagccagcatcatctctttggggaccactcctctggctttcatttttcagccacagtgattctttggaaaagtcaaatcatatcacttctctgcttcttccccaacacagctgcatggctcccgctctccctccttcaagtctctgctcaatgtcacttcattaaaggcaccttctataaactaaaaaaaaaaaaaaaaaaaaaaaaaaaaaaa

SEQ ID NO: 714 - protein, 398 aa, Homo sapiens
MPVPASWPHLPSPFLLMTLLLGRLTGVAGEDELQVIQPEKSVSVAAGESATLRCAMTSLIPVGPIMWFRGAGAGRELIYNQKEGHFPRVTTVSELTKRNNLDFSISISNITPADAGTYYCVKFRKGSPDDVEFKSGAGTELSVRAKPSAPVVSGPAVRATPEHTVSFTCESHGFSPRDITLKWFKNGNELSDFQTNVDPAGDSVSYSIHSTARVVLTRGDVHSQVICEIAHITLQGDPLRGTANLSEAIRVPPTLEVTQQPMRAENQANVTCQVSNFYPRGLQLTWLENGNVSRTETASTLIENKDGTYNWMSWLLVNTCAHRDDVVLTCQVEHDGQQAVSKSYALEISAHQKEHGSDITHEAALAPTAPLLVALLLGPKLLLVVGVSAIYICWKQKA

SEQ ID NO: 715 - DNA, 958 bp, Homo sapiens
gcctgacctcagttgttccagggtaaagaatttgggcagtgcccacacccacgctgttggataacatttcttcaccataccagtgagggtgaatgtgtacacgcccagcttcctgcctgttactctccacagtatgcgaagaatatccctgacttctagccctgtgcgccttcttttgtttctgctgttgctactaatagccttggagatcatggttggtggtcactctctttgcttcaacttcactataaaatcattgtccagacctggacagccctggtgtgaagcgcaggtcttcttgaataaaaatcttttccttcagtacaacagtgacaacaacatggtcaaacctctgggcctcctggggaagaaggtatatgccaccagcacttggggagaattgacccaaacgctgggagaagtggggcgagacctcaggatgctcctttgtgacatcaaaccccagataaagaccagtgatccttccactctgcaagtcgagatgttttgtcaacgtgaagcagaacggtgcactggtgcatcctggcagttcgccaccaatggagagaaatccctcctctttgacgcaatgaacatgacctggacagtaattaatcatgaagccagtaagatcaaggagacatggaagaaagacagagggctggaaaagtatttcaggaagctctcaaagggagactgcgatcactggctcagggaattcttagggcactgggaggcaatgccagaaccgacagtgtcaccagtaaatgcttcagatatccactggtcttcttctagtctaccagatagatggatcatcctgggggcattcatcctgttagttttaatgggaattgttctcatctgtgtctggtggcaaaatggtgagtggcaggctggtctctggcccttgaggacgtcttagtctggtaaggactcaagagaggtgaatcatggg

SEQ ID NO: 716 - protein, 263 aa, Homo sapiens
MRRISLTSSPVRLLLFLLLLLIALEIMVGGHSLCFNFTIKSLSRPGQPWCEAQVFLNKNLFLQYNSDNNMVKPLGLLGKKVYATSTWGELTQTLGEVGRDLRMLLCDIKPQIKTSDPSTLQVEMFCQREAERCTGASWQFATNGEKSLLFDAMNMTWTVINHEASKIKETWKKDRGLEKYFRKLSKGDCDHWLREFLGHWEAMPEPTVSPVNASDIHWSSSSLPDRWIILGAFILLVLMGIVLICVWWQNGEWQAGLWPLRTS

SEQ ID NO: 717 - DNA, 850 bp, Homo sapiens
gcctgacctcagttgttccagggtaaagaatttgggcagtgcccacacccacgctgttggataacatttcttcaccataccagtgagggtgaatgtgtacacgcccagcttcctgcctgttactctccacagtatgcgaagaatatccctgacttctagccctgtgcgccttcttttgtttctgctgttgctactaatagccttggagatcatgtacaacagtgacaacaacatggtcaaacctctgggcctcctggggaagaaggtatatgccaccagcacttggggagaattgacccaaacgctgggagaagtggggcgagacctcaggatgctcctttgtgacatcaaaccccagataaagaccagtgatccttccactctgcaagtcgagatgttttgtcaacgtgaagcagaacggtgcactggtgcatcctggcagttcgccaccaatggagagaaatccctcctctttgacgcaatgaacatgacctggacagtaattaatcatgaagccagtaagatcaaggagacatggaagaaagacagagggctggaaaagtatttcaggaagctctcaaagggagactgcgatcactggctcagggaattcttagggcactgggaggcaatgccagaaccgacagtgtcaccagtaaatgcttcagatatccactggtcttcttctagtctaccagatagatggatcatcctgggggcattcatcctgttagttttaatgggaattgttctcatctgtgtctggtggcaaaatggtgagtggcaggctggtctctggcccttgaggacgtcttagtctggtaaggactcaagagaggtgaatcatggg

SEQ ID NO: 718 - protein, 227 aa, Homo sapiens
MRRISLTSSPVRLLLFLLLLLIALEIMYNSDNNMVKPLGLLGKKVYATSTWGELTQTLGEVGRDLRMLLCDIKPQIKTSDPSTLQVEMFCQREAERCTGASWQFATNGEKSLLFDAMNMTWTVINHEASKIKETWKKDRGLEKYFRKLSKGDCDHWLREFLGHWEAMPEPTVSPVNASDIHWSSSSLPDRWIILGAFILLVLMGIVLICVWWQNGEWQAGLWPLRTS

SEQ ID NO: 719 - DNA, 1032 bp, Homo sapiens
gcctgacctcagttgttccagggtaaagaatttgggcagtgcccacacccacgctgttggataacatttcttcaccataccagtgagggtgaatgtgtacacgcccagcttcctgcctgttactctccacagtatgcgaagaatatccctgacttctagccctgtgcgccttcttttgtttctgctgttgctactaatagccttggagatcatggttggtggtcactctctttgcttcaacttcactataaaatcattgtccagacctggacagccctggtgtgaagcgcaggtcttcttgaataaaaatcttttccttcagtacaacagtgacaacaacatggtcaaacctctgggcctcctggggaagaaggtatatgccaccagcacttggggagaattgacccaaacgctgggagaagtggggcgagacctcaggatgctcctttgtgacatcaaaccccagataaagaccagtgatccttccactctgcaagtcgagatgttttgtcaacgtgaagcagaacggtgcactggtgcatcctggcagttcgccaccaatggagagaaatccctcctctttgacgcaatgaacatgacctggacagtaattaatcatgaagccagtaagatcaaggagacatggaagaaagacagagggctggaaaagtatttcaggaagctctcaaagggagactgcgatcactggctcagggaattcttagggcactgggaggcaatgccagaaccgacaggtaactgagctgggtgggagaatgtggcagctccctttaaaggtcaaaagccttccctgtgtgggtgtcagtgtgtgtgtgcgatagaaaatttgattgacttctccgtgggcttcctgtctggagagtcagtgatggctataaggatttcccaccatcctccctttcccatcccacctcccactgtttcttcctcagtgtagaaaccccttcccattaaccaatgatccagtcacaatgacccactgctaaaaaaaaaaaaaaaaaaaaaaaaaaa

SEQ ID NO: 720 - protein, 209 aa, Homo sapiens
MRRISLTSSPVRLLLFLLLLLIALEIMVGGHSLCFNFTIKSLSRPGQPWCEAQVFLNKNLFLQYNSDNNMVKPLGLLGKKVYATSTWGELTQTLGEVGRDLRMLLCDIKPQIKTSDPSTLQVEMFCQREAERCTGASWQFATNGEKSLLFDAMNMTWTVINHEASKIKETWKKDRGLEKYFRKLSKGDCDHWLREFLGHWEAMPEPTGN

SEQ ID NO: 721 - DNA, 2099 bp, Homo sapiens
cctaattctcaaggtgatgctatttaggaagtcataactcatgtgagtggagccatgtgggattaagaagtgataggagagcttgctgtctgtctctgctctccactgtgtgaggatacaacaggaagacagccatctggtgaggaagagagggccctcgccagataccggacctgctgacaccttgatcttggacttcccatcttccaggaaggcctgacctcagttgttccagggtaaagaatttgggcagtgcccacacccacgctgttggataacatttcttcaccataccagtgagggtgaatgtgtacacgcccagcttcctgcctgttactctccacagtatgcgaagaatatccctgacttctagccctgtgcgccttcttttgtttctgctgttgctactaatagccttggagatcatggttggtggtcactctctttgcttcaacttcactataaaatcattgtccagacctggacagccctggtgtgaagcgcaggtcttcttgaataaaaatcttttccttcagtacaacagtgacaacaacatggtcaaacctctgggcctcctggggaagaaggtatatgccaccagcacttggggagaattgacccaaacgctgggagaagtggggcgagacctcaggatgctcctttgtgacatcaaaccccagataaagaccagtgatccttccactctgcaagtcgagatgttttgtcaacgtgaagcagaacggtgcactggtgcatcctggcagttcgccaccaatggagagaaatccctcctctttgacgcaatgaacatgacctggacagtaattaatcatgaagccagtaagatcaaggagacatggaagaaagacagagggctggaaaagtatttcaggaagctctcaaagggagactgcgatcactggctcagggaattcttagggcactgggaggcaatgccagaaccgacaggcagaagatccacctagaggtgataccacggcggcgcagagttgttcacctgtggtcctcgatcgctgacagccttggctcccactgctgtgtgttccctgagtcaagtggaggcggagcctgcaatgagcggagatcgcgcctctgcattccagtcttggcaacagagcaagactccgtctcaaaaaaaaaaaattttttttcagtacatattttttaaaagatagggctgggcacagcagctcacatctataatcccaacactttgggaggcctaggcaggaggatcacttgagcccaggaatctgaagctgcagtgagcctttgctcgtgagattgtggacctatgatcctaccaccagcccacctggttctaacaccccctcctctatgtgtgagagggagagaagaaaagtgagggagaaaagagagataagcaaagaacagagaggaaaaatggaaaataagaggaaattgggggaattaaacagaggggagggcatggatccccgggagttagaagagtagcagcttgtggattactacgcagtggaggaagaagagttgttggaaattatttgagaggtagtataatcatttgtgaggcagttttctgcattcaccatttctcacagactaagttactcataagcaaacgtgcaattcacattacactgaaattcttccctaatacatcatttgcattggaataaagtacggttttcaaacaacctgatatagcagaactgactgtataaattatgtgagcacagtgcaagtaattctttgtttgtttgtttgtttttttgagacagagtctcactctatctcccaggctggagtgtagtggtgcgatcccggctcactgcaacctcgatctcccaggctcaagcgattcccctgcctcagcctcctgagtagctgggattacaggcatgagccaccacgcccggctaatttttgtatttttagtagagacggggtttcaccctgttggccaggctggtctcgaactacggacctcaggtgatctgcccccctcagcctctcaaagtgctgggattatagcatgagccactgagcccagacacaagtagttctttctgataaacactttaacactgaatgca

SEQ ID NO: 722 - protein, 212 aa, Homo sapiens
MRRISLTSSPVRLLLFLLLLLIALEIMVGGHSLCFNFTIKSLSRPGQPWCEAQVFLNKNLFLQYNSDNNMVKPLGLLGKKVYATSTWGELTQTLGEVGRDLRMLLCDIKPQIKTSDPSTLQVEMFCQREAERCTGASWQFATNGEKSLLFDAMNMTWTVINHEASKIKETWKKDRGLEKYFRKLSKGDCDHWLREFLGHWEAMPEPTGRRST

SEQ ID NO: 723 - DNA, 3458 bp, Homo sapiens
aaaccttctgctgagccttgtgtcacagtcagtccgcggcgccacaagcctcagtgtttacttctgccgcctgccagccgggcggggaaggggagtacccggccacccctcactttagctcctgcagctttccaaacaaaccagggcgggatgggagtgtcttcttggctgtggaaatcgatcctcctaccttgtcctgaagccacccgccgcctttcctcgtccctcccttcgcggtgattttccggtcccggcgcccggcgagggcgcgcggctggtgtccgccccgcccgaaaggtgagccagccatgagagggtatcttgtggccatattcctgagtgctgtcttcctctattatgtactgcattgcatattatggggaacgaatgtctattgggtggcacctgtggaaatgaaacggagaaataagatccagccttgtttatcaaagccagcttttgcctctctgctgagtcagagctctgcatatattttaagaaaaggcattgaggaactcaatcaaaccagtattcttttcacacaggtttcatcagtttcacccttttctgtgtgcggctgattttagaaagattgcttccttgtatggtagcgataagtttgatttgccctatgggatgagaacatcagcggaatattttcgacttgctctttcaaaactgcagagttgtgatctctttgatgagtttgacaacataccctgtaaaaagtgtgtggtggttggtaatggaggagttttgaagaataagacattaggagaaaaaatcgactcctatgatgtaataataagaatgaataatggtcctgttttaggacatgaagaagaagttgggagaaggacaaccttccgacttttttatccagaatctgttttttcagatcctattcacaatgaccctaatacgacagtgattctcactgcttttaagccacatgatttaaggtggctgttggaattgttgatgggtgacaaaataaacactaatggtttttggaagaaaccagccttaaacctgatttataaaccttatcaaatccgaatattagatcctttcattatcagaacagcagcttatgaactgcttcattttccaaaagtgtttcccaaaaatcagaaacctaaacacccaacaacaggaattattgccatcacattggcgttttacatatgtcacgaagttcacctagctggttttaaatacaacttttctgacctcaagagtcctttgcactactatgggaatgccaccatgtctttgatgaataagaacgcgtatcacaatgtgactgcagagcagctctttttgaaggacattatagaaaaaaacctcgtaatcaacttgactcaagattgactctacagactcagaagatgatgctaacagtgttagttttatttttgtactgcaatttttagtttaaaatatgttggatgcactcgtcaaataattatgtatactgtctgttgctgcctggtgattcataaccaccagcttaatttctgtgaatactgtatatttaacttatgaaaaccaagaaatgtaaagataacaggaaaataagttttgattgcattgtttttaaaataagctagttttctgaggtgttttcacacgtctttttatagttacttcatcttagatttttgaagggatatgacttcctactaaggatttagtttaccacaacaattctgactacaataagacattttgaggaggatatttggctactgtaaacatggctggtggaaaatcacgattgtggcttgatgtggcaagccgaaaccacttggctctggaaatctaagttcatactggtttaattaagctctctcctgacaacccccagaattaaatgaaccatgattgtgaagagtaatttggtacaatgaaggcagtgtttgtttttaagttaaaggaaatgggctaaacataaagttcttattagataagtaaataactaaagaaagaatacaattactaaactctgatggctttgtattattttaaagaaatgaagtttaactttatacagtgaagctaagctaggcaagctcaagaaggaaaaaaaaatcttgaacattatttttttttgcctgacttacttattcattaaattttgaaggttttccacttgaagtaaattaggaaaggtaaagaagataacagaacaagtaaacacttaagaaaagtcaagctgaggccgggcagggtggctcacacctgtaatcctaacaaacactttgggaggccgagggaggcagctggattgcctgaactcaggagttcaagaccagcctggccaacatggtgaaacctcatctctactaaaatacaaaataattagctgggcgtggtggtatgcgctgtagtcccaggtactcgggaggctgaggcacgagaattgcttgagcccgggaggcagaggttgcagtgagccaagatcgcgccactgcacttcagcctgggtgacagagtgaggctgtcttctaaaaaatataaaaagtgaagttgggatttttggatttaaatggtacaaaaagaatatctcattttcccatgattaaagctaatcttcagatggaaagcttgcctggctacctagggtgcaccagagaatctgatccaatgcaagccagtcaatcctacaaatgtggtgagctagtcttccttcctatattttaataaatgtaaccaaaggccatctggaggtaggggaatgagaggtgaagaaacagaaaaatagaggttataaggatggaactaaaagttgtcagaagaggtatgagctgaagaaagaattactctcttttgaccaataaatacaattgggaaacactggaaaaccatggcttgattactgacaaccaacctgcctctctaaagagggtgtataaagggtgaaatacattagatttggctcagaaacagaatgcggtacttataaagcagaataaaggggagaacagtagtagttgatctaacccagattagacatgaataccagcatatgtttgcagagtcccacagttttgattcctcttataactttttgaggtgcaaaaggaaggtaccagaactggaatcacatgtaatcaatcagtgtgattttcccctcataccacacagccataggctgcagtgtggctgctgaagttcaattgatataaagtaaatcaggcttcaaaaagaatggtgctgtgggtacacaaggacataaagatgggaacgatagacactgaggactgcggcggggggagcgaggggagcggggagggcaagggctgaaagactatgtattgggtactatgctcacaacctggatgatgggatcattcataccacaaacctcagtatcacacaatatacccatgtaacaacctgcactctgcacatgtacccttagaatctaaaataaaagttgaaattattttttt

SEQ ID NO: 724 - protein, 245 aa, Homo sapiens
MRTSAEYFRLALSKLQSCDLFDEFDNIPCKKCVVVGNGGVLKNKTLGEKIDSYDVIIRMNNGPVLGHEEEVGRRTTFRLFYPESVFSDPIHNDPNTTVILTAFKPHDLRWLLELLMGDKINTNGFWKKPALNLIYKPYQIRILDPFIIRTAAYELLHFPKVFPKNQKPKHPTTGIIAITLAFYICHEVHLAGFKYNFSDLKSPLHYYGNATMSLMNKNAYHNVTAEQLFLKDIIEKNLVINLTQD

SEQ ID NO: 725 - DNA, 3399 bp, Homo sapiens
gtcgcccgggattggggctggcgggagcctgagactccgggcagggctgctccctcctctgctcccccgccagatccgcggggaaggaatcgtgcccgcgccgcccctggcccgcgccaccttcctttggtttctgccggcctcgggcttctgcggcccgatgtggcaggcgccgcgagagaggcagcagccggctggagcagcggcccctcaggtctcggagcccggtgcgcctctgcggtcgtcgctcctgggcctcggcgggtcactcttgccggccggcttcgctgcgggtttgcactgcccgggtgagccagccatgagagggtatcttgtggccatattcctgagtgctgtcttcctctattatgtactgcattgcatattatggggaacgaatgtctattgggtggcacctgtggaaatgaaacggagaaataagatccagccttgtttatcaaagccagcttttgcctctctgctgaggtttcatcagtttcacccttttctgtgtgcggctgattttagaaagattgcttccttgtatggtagcgataagtttgatttgccctatgggatgagaacatcagcggaatattttcgacttgctctttcaaaactgcagagttgtgatctctttgatgagtttgacaacataccctgtaaaaagtgtgtggtggttggtaatggaggagttttgaagaataagacattaggagaaaaaatcgactcctatgatgtaataataagaatgaataatggtcctgttttaggacatgaagaagaagttgggagaaggacaaccttccgacttttttatccagaatctgttttttcagatcctattcacaatgaccctaatacgacagtgattctcactgcttttaagccacatgatttaaggtggctgttggaattgttgatgggtgacaaaataaacactaatggtttttggaagaaaccagccttaaacctgatttataaaccttatcaaatccgaatattagatcctttcattatcagaacagcagcttatgaactgcttcattttccaaaagtgtttcccaaaaatcagaaacctaaacacccaacaacaggaattattgccatcacattggcgttttacatatgtcacgaagttcacctagctggttttaaatacaacttttctgacctcaagagtcctttgcactactatgggaatgccaccatgtctttgatgaataagaacgcgtatcacaatgtgactgcagagcagctctttttgaaggacattatagaaaaaaacctcgtaatcaacttgactcaagattgactctacagactcagaagatgatgctaacagtgttagttttatttttgtactgcaatttttagtttaaaatatgttggatgcactcgtcaaataattatgtatactgtctgttgctgcctggtgattcataaccaccagcttaatttctgtgaatactgtatatttaacttatgaaaaccaagaaatgtaaagataacaggaaaataagttttgattgcattgtttttaaaataagctagttttctgaggtgttttcacacgtctttttatagttacttcatcttagatttttgaagggatatgacttcctactaaggatttagtttaccacaacaattctgactacaataagacattttgaggaggatatttggctactgtaaacatggctggtggaaaatcacgattgtggcttgatgtggcaagccgaaaccacttggctctggaaatctaagttcatactggtttaattaagctctctcctgacaacccccagaattaaatgaaccatgattgtgaagagtaatttggtacaatgaaggcagtgtttgtttttaagttaaaggaaatgggctaaacataaagttcttattagataagtaaataactaaagaaagaatacaattactaaactctgatggctttgtattattttaaagaaatgaagtttaactttatacagtgaagctaagctaggcaagctcaagaaggaaaaaaaaatcttgaacattatttttttttgcctgacttacttattcattaaattttgaaggttttccacttgaagtaaattaggaaaggtaaagaagataacagaacaagtaaacacttaagaaaagtcaagctgaggccgggcagggtggctcacacctgtaatcctaacaaacactttgggaggccgagggaggcagctggattgcctgaactcaggagttcaagaccagcctggccaacatggtgaaacctcatctctactaaaatacaaaataattagctgggcgtggtggtatgcgctgtagtcccaggtactcgggaggctgaggcacgagaattgcttgagcccgggaggcagaggttgcagtgagccaagatcgcgccactgcacttcagcctgggtgacagagtgaggctgtcttctaaaaaatataaaaagtgaagttgggatttttggatttaaatggtacaaaaagaatatctcattttcccatgattaaagctaatcttcagatggaaagcttgcctggctacctagggtgcaccagagaatctgatccaatgcaagccagtcaatcctacaaatgtggtgagctagtcttccttcctatattttaataaatgtaaccaaaggccatctggaggtaggggaatgagaggtgaagaaacagaaaaatagaggttataaggatggaactaaaagttgtcagaagaggtatgagctgaagaaagaattactctcttttgaccaataaatacaattgggaaacactggaaaaccatggcttgattactgacaaccaacctgcctctctaaagagggtgtataaagggtgaaatacattagatttggctcagaaacagaatgcggtacttataaagcagaataaaggggagaacagtagtagttgatctaacccagattagacatgaataccagcatatgtttgcagagtcccacagttttgattcctcttataactttttgaggtgcaaaaggaaggtaccagaactggaatcacatgtaatcaatcagtgtgattttcccctcataccacacagccataggctgcagtgtggctgctgaagttcaattgatataaagtaaatcaggcttcaaaaagaatggtgctgtgggtacacaaggacataaagatgggaacgatagacactgaggactgcggcggggggagcgaggggagcggggagggcaagggctgaaagactatgtattgggtactatgctcacaacctggatgatgggatcattcataccacaaacctcagtatcacacaatatacccatgtaacaacctgcactctgcacatgtacccttagaatctaaaataaaagttgaaattattttttt

SEQ ID NO: 726 - protein, 384 aa, Homo sapiens
MWQAPRERQQPAGAAAPQVSEPGAPLRSSLLGLGGSLLPAGFAAGLHCPGEPAMRGYLVAIFLSAVFLYYVLHCILWGTNVYWVAPVEMKRRNKIQPCLSKPAFASLLRFHQFHPFLCAADFRKIASLYGSDKFDLPYGMRTSAEYFRLALSKLQSCDLFDEFDNIPCKKCVVVGNGGVLKNKTLGEKIDSYDVIIRMNNGPVLGHEEEVGRRTTFRLFYPESVFSDPIHNDPNTTVILTAFKPHDLRWLLELLMGDKINTNGFWKKPALNLIYKPYQIRILDPFIIRTAAYELLHFPKVFPKNQKPKHPTTGIIAITLAFYICHEVHLAGFKYNFSDLKSPLHYYGNATMSLMNKNAYHNVTAEQLFLKDIIEKNLVINLTQD

SEQ ID NO: 727 - DNA, 3388 bp, Homo sapiens
aaaccttctgctgagccttgtgtcacagtcagtccgcggcgccacaagcctcagtgtttacttctgccgcctgccagccgggcggggaaggggagtacccggccacccctcactttagctcctgcagctttccaaacaaaccagggcgggatgggagtgtcttcttggctgtggaaatcgatcctcctaccttgtcctgaagccacccgccgcctttcctcgtccctcccttcgcggtgattttccggtcccggcgcccggcgagggcgcgcggctggtgtccgccccgcccgaaaggtgagccagccatgagagggtatcttgtggccatattcctgagtgctgtcttcctctattatgtactgcattgcatattatggggaacgaatgtctattgggtggcacctgtggaaatgaaacggagaaataagatccagccttgtttatcaaagccagcttttgcctctctgctgaggtttcatcagtttcacccttttctgtgtgcggctgattttagaaagattgcttccttgtatggtagcgataagtttgatttgccctatgggatgagaacatcagcggaatattttcgacttgctctttcaaaactgcagagttgtgatctctttgatgagtttgacaacataccctgtaaaaagtgtgtggtggttggtaatggaggagttttgaagaataagacattaggagaaaaaatcgactcctatgatgtaataataagaatgaataatggtcctgttttaggacatgaagaagaagttgggagaaggacaaccttccgacttttttatccagaatctgttttttcagatcctattcacaatgaccctaatacgacagtgattctcactgcttttaagccacatgatttaaggtggctgttggaattgttgatgggtgacaaaataaacactaatggtttttggaagaaaccagccttaaacctgatttataaaccttatcaaatccgaatattagatcctttcattatcagaacagcagcttatgaactgcttcattttccaaaagtgtttcccaaaaatcagaaacctaaacacccaacaacaggaattattgccatcacattggcgttttacatatgtcacgaagttcacctagctggttttaaatacaacttttctgacctcaagagtcctttgcactactatgggaatgccaccatgtctttgatgaataagaacgcgtatcacaatgtgactgcagagcagctctttttgaaggacattatagaaaaaaacctcgtaatcaacttgactcaagattgactctacagactcagaagatgatgctaacagtgttagttttatttttgtactgcaatttttagtttaaaatatgttggatgcactcgtcaaataattatgtatactgtctgttgctgcctggtgattcataaccaccagcttaatttctgtgaatactgtatatttaacttatgaaaaccaagaaatgtaaagataacaggaaaataagttttgattgcattgtttttaaaataagctagttttctgaggtgttttcacacgtctttttatagttacttcatcttagatttttgaagggatatgacttcctactaaggatttagtttaccacaacaattctgactacaataagacattttgaggaggatatttggctactgtaaacatggctggtggaaaatcacgattgtggcttgatgtggcaagccgaaaccacttggctctggaaatctaagttcatactggtttaattaagctctctcctgacaacccccagaattaaatgaaccatgattgtgaagagtaatttggtacaatgaaggcagtgtttgtttttaagttaaaggaaatgggctaaacataaagttcttattagataagtaaataactaaagaaagaatacaattactaaactctgatggctttgtattattttaaagaaatgaagtttaactttatacagtgaagctaagctaggcaagctcaagaaggaaaaaaaaatcttgaacattatttttttttgcctgacttacttattcattaaattttgaaggttttccacttgaagtaaattaggaaaggtaaagaagataacagaacaagtaaacacttaagaaaagtcaagctgaggccgggcagggtggctcacacctgtaatcctaacaaacactttgggaggccgagggaggcagctggattgcctgaactcaggagttcaagaccagcctggccaacatggtgaaacctcatctctactaaaatacaaaataattagctgggcgtggtggtatgcgctgtagtcccaggtactcgggaggctgaggcacgagaattgcttgagcccgggaggcagaggttgcagtgagccaagatcgcgccactgcacttcagcctgggtgacagagtgaggctgtcttctaaaaaatataaaaagtgaagttgggatttttggatttaaatggtacaaaaagaatatctcattttcccatgattaaagctaatcttcagatggaaagcttgcctggctacctagggtgcaccagagaatctgatccaatgcaagccagtcaatcctacaaatgtggtgagctagtcttccttcctatattttaataaatgtaaccaaaggccatctggaggtaggggaatgagaggtgaagaaacagaaaaatagaggttataaggatggaactaaaagttgtcagaagaggtatgagctgaagaaagaattactctcttttgaccaataaatacaattgggaaacactggaaaaccatggcttgattactgacaaccaacctgcctctctaaagagggtgtataaagggtgaaatacattagatttggctcagaaacagaatgcggtacttataaagcagaataaaggggagaacagtagtagttgatctaacccagattagacatgaataccagcatatgtttgcagagtcccacagttttgattcctcttataactttttgaggtgcaaaaggaaggtaccagaactggaatcacatgtaatcaatcagtgtgattttcccctcataccacacagccataggctgcagtgtggctgctgaagttcaattgatataaagtaaatcaggcttcaaaaagaatggtgctgtgggtacacaaggacataaagatgggaacgatagacactgaggactgcggcggggggagcgaggggagcggggagggcaagggctgaaagactatgtattgggtactatgctcacaacctggatgatgggatcattcataccacaaacctcagtatcacacaatatacccatgtaacaacctgcactctgcacatgtacccttagaatctaaaataaaagttgaaattattttttt

SEQ ID NO: 728 - protein, 331 aa, Homo sapiens
MRGYLVAIFLSAVFLYYVLHCILWGTNVYWVAPVEMKRRNKIQPCLSKPAFASLLRFHQFHPFLCAADFRKIASLYGSDKFDLPYGMRTSAEYFRLALSKLQSCDLFDEFDNIPCKKCVVVGNGGVLKNKTLGEKIDSYDVIIRMNNGPVLGHEEEVGRRTTFRLFYPESVFSDPIHNDPNTTVILTAFKPHDLRWLLELLMGDKINTNGFWKKPALNLIYKPYQIRILDPFIIRTAAYELLHFPKVFPKNQKPKHPTTGIIAITLAFYICHEVHLAGFKYNFSDLKSPLHYYGNATMSLMNKNAYHNVTAEQLFLKDIIEKNLVINLTQD

SEQ ID NO: 729 - DNA, 3362 bp, Homo sapiens
aaaccttctgctgagccttgtgtcacagtcagtccgcggcgccacaagcctcagtgtttacttctgccgcctgccagccgggcggggaaggggagtacccggccacccctcactttagctcctgcagctttccaaacaaaccagggcgggatgggagtgtcttcttggctgtggaaatcgatcctcctaccttgtcctgaagccacccgccgcctttcctcgtccctcccttcgcggtgattttccggtcccggcgcccggcgagggcgcgcggctggtgtccgccccgcccgaaaggtgagccagccatgagagggtatcttgtggccatattcctgagtgctgtcttcctctattatgtactgcattgcatattatggggaacgaatgtctattgggtggcacctgtggaaatgaaacggagaaataagatccagccttgtttatcaaagccagcttttgcctctctgctgagtcagagctctgcatatattttaagaaaaggcattgaggaactcaatcaaaccagtattcttttcacacaggtttcatcagtttcacccttttctgtgtgcggctgattttagaaagattgcttccttgtatggtagcgataagtttgatttgccctatgggatgagaacatcagcggaatattttcgacttgctctttcaaaactgcagagttgtgatctctttgatgagtttgacaaaatgaataatggtcctgttttaggacatgaagaagaagttgggagaaggacaaccttccgacttttttatccagaatctgttttttcagatcctattcacaatgaccctaatacgacagtgattctcactgcttttaagccacatgatttaaggtggctgttggaattgttgatgggtgacaaaataaacactaatggtttttggaagaaaccagccttaaacctgatttataaaccttatcaaatccgaatattagatcctttcattatcagaacagcagcttatgaactgcttcattttccaaaagtgtttcccaaaaatcagaaacctaaacacccaacaacaggaattattgccatcacattggcgttttacatatgtcacgaagttcacctagctggttttaaatacaacttttctgacctcaagagtcctttgcactactatgggaatgccaccatgtctttgatgaataagaacgcgtatcacaatgtgactgcagagcagctctttttgaaggacattatagaaaaaaacctcgtaatcaacttgactcaagattgactctacagactcagaagatgatgctaacagtgttagttttatttttgtactgcaatttttagtttaaaatatgttggatgcactcgtcaaataattatgtatactgtctgttgctgcctggtgattcataaccaccagcttaatttctgtgaatactgtatatttaacttatgaaaaccaagaaatgtaaagataacaggaaaataagttttgattgcattgtttttaaaataagctagttttctgaggtgttttcacacgtctttttatagttacttcatcttagatttttgaagggatatgacttcctactaaggatttagtttaccacaacaattctgactacaataagacattttgaggaggatatttggctactgtaaacatggctggtggaaaatcacgattgtggcttgatgtggcaagccgaaaccacttggctctggaaatctaagttcatactggtttaattaagctctctcctgacaacccccagaattaaatgaaccatgattgtgaagagtaatttggtacaatgaaggcagtgtttgtttttaagttaaaggaaatgggctaaacataaagttcttattagataagtaaataactaaagaaagaatacaattactaaactctgatggctttgtattattttaaagaaatgaagtttaactttatacagtgaagctaagctaggcaagctcaagaaggaaaaaaaaatcttgaacattatttttttttgcctgacttacttattcattaaattttgaaggttttccacttgaagtaaattaggaaaggtaaagaagataacagaacaagtaaacacttaagaaaagtcaagctgaggccgggcagggtggctcacacctgtaatcctaacaaacactttgggaggccgagggaggcagctggattgcctgaactcaggagttcaagaccagcctggccaacatggtgaaacctcatctctactaaaatacaaaataattagctgggcgtggtggtatgcgctgtagtcccaggtactcgggaggctgaggcacgagaattgcttgagcccgggaggcagaggttgcagtgagccaagatcgcgccactgcacttcagcctgggtgacagagtgaggctgtcttctaaaaaatataaaaagtgaagttgggatttttggatttaaatggtacaaaaagaatatctcattttcccatgattaaagctaatcttcagatggaaagcttgcctggctacctagggtgcaccagagaatctgatccaatgcaagccagtcaatcctacaaatgtggtgagctagtcttccttcctatattttaataaatgtaaccaaaggccatctggaggtaggggaatgagaggtgaagaaacagaaaaatagaggttataaggatggaactaaaagttgtcagaagaggtatgagctgaagaaagaattactctcttttgaccaataaatacaattgggaaacactggaaaaccatggcttgattactgacaaccaacctgcctctctaaagagggtgtataaagggtgaaatacattagatttggctcagaaacagaatgcggtacttataaagcagaataaaggggagaacagtagtagttgatctaacccagattagacatgaataccagcatatgtttgcagagtcccacagttttgattcctcttataactttttgaggtgcaaaaggaaggtaccagaactggaatcacatgtaatcaatcagtgtgattttcccctcataccacacagccataggctgcagtgtggctgctgaagttcaattgatataaagtaaatcaggcttcaaaaagaatggtgctgtgggtacacaaggacataaagatgggaacgatagacactgaggactgcggcggggggagcgaggggagcggggagggcaagggctgaaagactatgtattgggtactatgctcacaacctggatgatgggatcattcataccacaaacctcagtatcacacaatatacccatgtaacaacctgcactctgcacatgtacccttagaatctaaaataaaagttgaaattattttttt

SEQ ID NO: 730 - protein, 213 aa, Homo sapiens
MRTSAEYFRLALSKLQSCDLFDEFDKMNNGPVLGHEEEVGRRTTFRLFYPESVFSDPIHNDPNTTVILTAFKPHDLRWLLELLMGDKINTNGFWKKPALNLIYKPYQIRILDPFIIRTAAYELLHFPKVFPKNQKPKHPTTGIIAITLAFYICHEVHLAGFKYNFSDLKSPLHYYGNATMSLMNKNAYHNVTAEQLFLKDIIEKNLVINLTQD

SEQ ID NO: 731 - DNA, 3146 bp, Homo sapiens
aaaccttctgctgagccttgtgtcacagtcagtccgcggcgccacaagcctcagtgtttacttctgccgcctgccagccgggcggggaaggggagtacccggccacccctcactttagctcctgcagctttccaaacaaaccagggcgggatgggagtgtcttcttggctgtggaaatcgatcctcctaccttgtcctgaagccacccgccgcctttcctcgtccctcccttcgcggtgattttccggtcccggcgcccggcgagggcgcgcggctggtgtccgccccgcccgaaaggtttcatcagtttcacccttttctgtgtgcggctgattttagaaagattgcttccttgtatggtagcgataagtttgatttgccctatgggatgagaacatcagcataccctgtaaaaagtgtgtggtggttggtaatggaggagttttgaagaataagacattaggagaaaaaatcgactcctatgatgtaataataagaatgaataatggtcctgttttaggacatgaagaagaagttgggagaaggacaaccttccgacttttttatccagaatctgttttttcagatcctattcacaatgaccctaatacgacagtgattctcactgcttttaagccacatgatttaaggtggctgttggaattgttgatgggtgacaaaataaacactaatggtttttggaagaaaccagccttaaacctgatttataaaccttatcaaatccgaatattagatcctttcattatcagaacagcagcttatgaactgcttcattttccaaaagtgtttcccaaaaatcagaaacctaaacacccaacaacaggaattattgccatcacattggcgttttacatatgtcacgaagttcacctagctggttttaaatacaacttttctgacctcaagagtcctttgcactactatgggaatgccaccatgtctttgatgaataagaacgcgtatcacaatgtgactgcagagcagctctttttgaaggacattatagaaaaaaacctcgtaatcaacttgactcaagattgactctacagactcagaagatgatgctaacagtgttagttttatttttgtactgcaatttttagtttaaaatatgttggatgcactcgtcaaataattatgtatactgtctgttgctgcctggtgattcataaccaccagcttaatttctgtgaatactgtatatttaacttatgaaaaccaagaaatgtaaagataacaggaaaataagttttgattgcattgtttttaaaataagctagttttctgaggtgttttcacacgtctttttatagttacttcatcttagatttttgaagggatatgacttcctactaaggatttagtttaccacaacaattctgactacaataagacattttgaggaggatatttggctactgtaaacatggctggtggaaaatcacgattgtggcttgatgtggcaagccgaaaccacttggctctggaaatctaagttcatactggtttaattaagctctctcctgacaacccccagaattaaatgaaccatgattgtgaagagtaatttggtacaatgaaggcagtgtttgtttttaagttaaaggaaatgggctaaacataaagttcttattagataagtaaataactaaagaaagaatacaattactaaactctgatggctttgtattattttaaagaaatgaagtttaactttatacagtgaagctaagctaggcaagctcaagaaggaaaaaaaaatcttgaacattatttttttttgcctgacttacttattcattaaattttgaaggttttccacttgaagtaaattaggaaaggtaaagaagataacagaacaagtaaacacttaagaaaagtcaagctgaggccgggcagggtggctcacacctgtaatcctaacaaacactttgggaggccgagggaggcagctggattgcctgaactcaggagttcaagaccagcctggccaacatggtgaaacctcatctctactaaaatacaaaataattagctgggcgtggtggtatgcgctgtagtcccaggtactcgggaggctgaggcacgagaattgcttgagcccgggaggcagaggttgcagtgagccaagatcgcgccactgcacttcagcctgggtgacagagtgaggctgtcttctaaaaaatataaaaagtgaagttgggatttttggatttaaatggtacaaaaagaatatctcattttcccatgattaaagctaatcttcagatggaaagcttgcctggctacctagggtgcaccagagaatctgatccaatgcaagccagtcaatcctacaaatgtggtgagctagtcttccttcctatattttaataaatgtaaccaaaggccatctggaggtaggggaatgagaggtgaagaaacagaaaaatagaggttataaggatggaactaaaagttgtcagaagaggtatgagctgaagaaagaattactctcttttgaccaataaatacaattgggaaacactggaaaaccatggcttgattactgacaaccaacctgcctctctaaagagggtgtataaagggtgaaatacattagatttggctcagaaacagaatgcggtacttataaagcagaataaaggggagaacagtagtagttgatctaacccagattagacatgaataccagcatatgtttgcagagtcccacagttttgattcctcttataactttttgaggtgcaaaaggaaggtaccagaactggaatcacatgtaatcaatcagtgtgattttcccctcataccacacagccataggctgcagtgtggctgctgaagttcaattgatataaagtaaatcaggcttcaaaaagaatggtgctgtgggtacacaaggacataaagatgggaacgatagacactgaggactgcggcggggggagcgaggggagcggggagggcaagggctgaaagactatgtattgggtactatgctcacaacctggatgatgggatcattcataccacaaacctcagtatcacacaatatacccatgtaacaacctgcactctgcacatgtacccttagaatctaaaataaaagttgaaattattttttt

SEQ ID NO: 732 - protein, 187 aa, Homo sapiens
MNNGPVLGHEEEVGRRTTFRLFYPESVFSDPIHNDPNTTVILTAFKPHDLRWLLELLMGDKINTNGFWKKPALNLIYKPYQIRILDPFIIRTAAYELLHFPKVFPKNQKPKHPTTGIIAITLAFYICHEVHLAGFKYNFSDLKSPLHYYGNATMSLMNKNAYHNVTAEQLFLKDIIEKNLVINLTQD

SEQ ID NO: 733 - DNA, 3560 bp, Homo sapiens
aaaccttctgctgagccttgtgtcacagtcagtccgcggcgccacaagcctcagtgtttacttctgccgcctgccagccgggcggggaaggggagtacccggccacccctcactttagctcctgcagctttccaaacaaaccagggcgggatgggagtgtcttcttggctgtggaaatcgatcctcctaccttgtcctgaagccacccgccgcctttcctcgtccctcccttcgcggtgattttccggtcccggcgcccggcgagggcgcgcggctggtgtccgccccgcccgaaagcatttgcaagtgaggaagcagcacaaccctgggttttagataatttctaacagagaggccccagcaattcagcaggcagcgtcctgagtctttggcagcctggtccctctttcgcaaattctccacctttgcgaacagagggtctttaggacacagattcttaaaagtgcaggtgagccagccatgagagggtatcttgtggccatattcctgagtgctgtcttcctctattatgtactgcattgcatattatggggaacgaatgtctattgggtggcacctgtggaaatgaaacggagaaataagatccagccttgtttatcaaagccagcttttgcctctctgctgaggtttcatcagtttcacccttttctgtgtgcggctgattttagaaagattgcttccttgtatggtagcgataagtttgatttgccctatgggatgagaacatcagcggaatattttcgacttgctctttcaaaactgcagagttgtgatctctttgatgagtttgacaacataccctgtaaaaagtgtgtggtggttggtaatggaggagttttgaagaataagacattaggagaaaaaatcgactcctatgatgtaataataagaatgaataatggtcctgttttaggacatgaagaagaagttgggagaaggacaaccttccgacttttttatccagaatctgttttttcagatcctattcacaatgaccctaatacgacagtgattctcactgcttttaagccacatgatttaaggtggctgttggaattgttgatgggtgacaaaataaacactaatggtttttggaagaaaccagccttaaacctgatttataaaccttatcaaatccgaatattagatcctttcattatcagaacagcagcttatgaactgcttcattttccaaaagtgtttcccaaaaatcagaaacctaaacacccaacaacaggaattattgccatcacattggcgttttacatatgtcacgaagttcacctagctggttttaaatacaacttttctgacctcaagagtcctttgcactactatgggaatgccaccatgtctttgatgaataagaacgcgtatcacaatgtgactgcagagcagctctttttgaaggacattatagaaaaaaacctcgtaatcaacttgactcaagattgactctacagactcagaagatgatgctaacagtgttagttttatttttgtactgcaatttttagtttaaaatatgttggatgcactcgtcaaataattatgtatactgtctgttgctgcctggtgattcataaccaccagcttaatttctgtgaatactgtatatttaacttatgaaaaccaagaaatgtaaagataacaggaaaataagttttgattgcattgtttttaaaataagctagttttctgaggtgttttcacacgtctttttatagttacttcatcttagatttttgaagggatatgacttcctactaaggatttagtttaccacaacaattctgactacaataagacattttgaggaggatatttggctactgtaaacatggctggtggaaaatcacgattgtggcttgatgtggcaagccgaaaccacttggctctggaaatctaagttcatactggtttaattaagctctctcctgacaacccccagaattaaatgaaccatgattgtgaagagtaatttggtacaatgaaggcagtgtttgtttttaagttaaaggaaatgggctaaacataaagttcttattagataagtaaataactaaagaaagaatacaattactaaactctgatggctttgtattattttaaagaaatgaagtttaactttatacagtgaagctaagctaggcaagctcaagaaggaaaaaaaaatcttgaacattatttttttttgcctgacttacttattcattaaattttgaaggttttccacttgaagtaaattaggaaaggtaaagaagataacagaacaagtaaacacttaagaaaagtcaagctgaggccgggcagggtggctcacacctgtaatcctaacaaacactttgggaggccgagggaggcagctggattgcctgaactcaggagttcaagaccagcctggccaacatggtgaaacctcatctctactaaaatacaaaataattagctgggcgtggtggtatgcgctgtagtcccaggtactcgggaggctgaggcacgagaattgcttgagcccgggaggcagaggttgcagtgagccaagatcgcgccactgcacttcagcctgggtgacagagtgaggctgtcttctaaaaaatataaaaagtgaagttgggatttttggatttaaatggtacaaaaagaatatctcattttcccatgattaaagctaatcttcagatggaaagcttgcctggctacctagggtgcaccagagaatctgatccaatgcaagccagtcaatcctacaaatgtggtgagctagtcttccttcctatattttaataaatgtaaccaaaggccatctggaggtaggggaatgagaggtgaagaaacagaaaaatagaggttataaggatggaactaaaagttgtcagaagaggtatgagctgaagaaagaattactctcttttgaccaataaatacaattgggaaacactggaaaaccatggcttgattactgacaaccaacctgcctctctaaagagggtgtataaagggtgaaatacattagatttggctcagaaacagaatgcggtacttataaagcagaataaaggggagaacagtagtagttgatctaacccagattagacatgaataccagcatatgtttgcagagtcccacagttttgattcctcttataactttttgaggtgcaaaaggaaggtaccagaactggaatcacatgtaatcaatcagtgtgattttcccctcataccacacagccataggctgcagtgtggctgctgaagttcaattgatataaagtaaatcaggcttcaaaaagaatggtgctgtgggtacacaaggacataaagatgggaacgatagacactgaggactgcggcggggggagcgaggggagcggggagggcaagggctgaaagactatgtattgggtactatgctcacaacctggatgatgggatcattcataccacaaacctcagtatcacacaatatacccatgtaacaacctgcactctgcacatgtacccttagaatctaaaataaaagttgaaattattttttt

SEQ ID NO: 734 - protein, 331 aa, Homo sapiens; identical to SEQ ID NO: 728

SEQ ID NO: 735 - DNA, 3324 bp, Homo sapiens
aaaccttctgctgagccttgtgtcacagtcagtccgcggcgccacaagcctcagtgtttacttctgccgcctgccagccgggcggggaaggggagtacccggccacccctcactttagctcctgcagctttccaaacaaaccagggcgggatgggagtgtcttcttggctgtggaaatcgatcctcctaccttgtcctgaagccacccgccgcctttcctcgtccctcccttcgcggtgattttccggtcccggcgcccggcgagggcgcgcggctggtgtccgccccgcccgaaaggtgagccagccatgagagggtatcttgtggccatattcctgagtgctgtcttcctctattatgtactgcattgcatattatggggaacgaatgtctattgggtggcacctgtggaaatgaaacggagaaataagatccagccttgtttatcaaagccagcttttgcctctctgctgaggtttcatcagtttcacccttttctgtgtgcggctgattttagaaagattgcttccttgtatggtagcgataagtttgatttgccctatgggatgagaacatcagcataccctgtaaaaagtgtgtggtggttggtaatggaggagttttgaagaataagacattaggagaaaaaatcgactcctatgatgtaataataagaatgaataatggtcctgttttaggacatgaagaagaagttgggagaaggacaaccttccgacttttttatccagaatctgttttttcagatcctattcacaatgaccctaatacgacagtgattctcactgcttttaagccacatgatttaaggtggctgttggaattgttgatgggtgacaaaataaacactaatggtttttggaagaaaccagccttaaacctgatttataaaccttatcaaatccgaatattagatcctttcattatcagaacagcagcttatgaactgcttcattttccaaaagtgtttcccaaaaatcagaaacctaaacacccaacaacaggaattattgccatcacattggcgttttacatatgtcacgaagttcacctagctggttttaaatacaacttttctgacctcaagagtcctttgcactactatgggaatgccaccatgtctttgatgaataagaacgcgtatcacaatgtgactgcagagcagctctttttgaaggacattatagaaaaaaacctcgtaatcaacttgactcaagattgactctacagactcagaagatgatgctaacagtgttagttttatttttgtactgcaatttttagtttaaaatatgttggatgcactcgtcaaataattatgtatactgtctgttgctgcctggtgattcataaccaccagcttaatttctgtgaatactgtatatttaacttatgaaaaccaagaaatgtaaagataacaggaaaataagttttgattgcattgtttttaaaataagctagttttctgaggtgttttcacacgtctttttatagttacttcatcttagatttttgaagggatatgacttcctactaaggatttagtttaccacaacaattctgactacaataagacattttgaggaggatatttggctactgtaaacatggctggtggaaaatcacgattgtggcttgatgtggcaagccgaaaccacttggctctggaaatctaagttcatactggtttaattaagctctctcctgacaacccccagaattaaatgaaccatgattgtgaagagtaatttggtacaatgaaggcagtgtttgtttttaagttaaaggaaatgggctaaacataaagttcttattagataagtaaataactaaagaaagaatacaattactaaactctgatggctttgtattattttaaagaaatgaagtttaactttatacagtgaagctaagctaggcaagctcaagaaggaaaaaaaaatcttgaacattatttttttttgcctgacttacttattcattaaattttgaaggttttccacttgaagtaaattaggaaaggtaaagaagataacagaacaagtaaacacttaagaaaagtcaagctgaggccgggcagggtggctcacacctgtaatcctaacaaacactttgggaggccgagggaggcagctggattgcctgaactcaggagttcaagaccagcctggccaacatggtgaaacctcatctctactaaaatacaaaataattagctgggcgtggtggtatgcgctgtagtcccaggtactcgggaggctgaggcacgagaattgcttgagcccgggaggcagaggttgcagtgagccaagatcgcgccactgcacttcagcctgggtgacagagtgaggctgtcttctaaaaaatataaaaagtgaagttgggatttttggatttaaatggtacaaaaagaatatctcattttcccatgattaaagctaatcttcagatggaaagcttgcctggctacctagggtgcaccagagaatctgatccaatgcaagccagtcaatcctacaaatgtggtgagctagtcttccttcctatattttaataaatgtaaccaaaggccatctggaggtaggggaatgagaggtgaagaaacagaaaaatagaggttataaggatggaactaaaagttgtcagaagaggtatgagctgaagaaagaattactctcttttgaccaataaatacaattgggaaacactggaaaaccatggcttgattactgacaaccaacctgcctctctaaagagggtgtataaagggtgaaatacattagatttggctcagaaacagaatgcggtacttataaagcagaataaaggggagaacagtagtagttgatctaacccagattagacatgaataccagcatatgtttgcagagtcccacagttttgattcctcttataactttttgaggtgcaaaaggaaggtaccagaactggaatcacatgtaatcaatcagtgtgattttcccctcataccacacagccataggctgcagtgtggctgctgaagttcaattgatataaagtaaatcaggcttcaaaaagaatggtgctgtgggtacacaaggacataaagatgggaacgatagacactgaggactgcggcggggggagcgaggggagcggggagggcaagggctgaaagactatgtattgggtactatgctcacaacctggatgatgggatcattcataccacaaacctcagtatcacacaatatacccatgtaacaacctgcactctgcacatgtacccttagaatctaaaataaaagttgaaattattttttt

SEQ ID NO: 736 - protein, 187 aa, Homo sapiens; identical to SEQ ID NO: 732

SEQ ID NO: 737 - DNA, 3569 bp, Homo sapiens
aaaccttctgctgagccttgtgtcacagtcagtccgcggcgccacaagcctcagtgtttacttctgccgcctgccagccgggcggggaaggggagtacccggccacccctcactttagctcctgcagctttccaaacaaaccagggcgggatgggagtgtcttcttggctgtggaaatcgatcctcctaccttgtcctgaagccacccgccgcctttcctcgtccctcccttcgcggtgattttccggtcccggcgcccggcgagggcgcgcggctggtgtccgccccgcccgaaaggtgagccagccatgagagggtatcttgtggccatattcctgagtgctgtcttcctctattatgtactgcattgcatattatggggaacgaatgtctattgggtggcacctgtggaaatgaaacggagaaataagatccagccttgtttatcaaagccagcttttgcctctctgctgagtcagagctctgcatatattttaagaaaaggcattgaggaactcaatcaaaccagtattcttttcacacaggtttcatcagtttcacccttttctgtgtgcggctgattttagaaagattgcttccttgtatggtagcgataagtttgatttgccctatgggatgagaacatcagcggaatattttcgacttgctctttcaaaactgcagagttgtgatctctttgatgagtttgacaagaaatcctggagtctgagataaaaggggatctcaacaaccctcaggattcagaagtgttactcagctcagtctattactcagtggctgcatcaattggaaatgctcagaagcataccctgtaaaaagtgtgtggtggttggtaatggaggagttttgaagaataagacattaggagaaaaaatcgactcctatgatgtaataataagaatgaataatggtcctgttttaggacatgaagaagaagttgggagaaggacaaccttccgacttttttatccagaatctgttttttcagatcctattcacaatgaccctaatacgacagtgattctcactgcttttaagccacatgatttaaggtggctgttggaattgttgatgggtgacaaaataaacactaatggtttttggaagaaaccagccttaaacctgatttataaaccttatcaaatccgaatattagatcctttcattatcagaacagcagcttatgaactgcttcattttccaaaagtgtttcccaaaaatcagaaacctaaacacccaacaacaggaattattgccatcacattggcgttttacatatgtcacgaagttcacctagctggttttaaatacaacttttctgacctcaagagtcctttgcactactatgggaatgccaccatgtctttgatgaataagaacgcgtatcacaatgtgactgcagagcagctctttttgaaggacattatagaaaaaaacctcgtaatcaacttgactcaagattgactctacagactcagaagatgatgctaacagtgttagttttatttttgtactgcaatttttagtttaaaatatgttggatgcactcgtcaaataattatgtatactgtctgttgctgcctggtgattcataaccaccagcttaatttctgtgaatactgtatatttaacttatgaaaaccaagaaatgtaaagataacaggaaaataagttttgattgcattgtttttaaaataagctagttttctgaggtgttttcacacgtctttttatagttacttcatcttagatttttgaagggatatgacttcctactaaggatttagtttaccacaacaattctgactacaataagacattttgaggaggatatttggctactgtaaacatggctggtggaaaatcacgattgtggcttgatgtggcaagccgaaaccacttggctctggaaatctaagttcatactggtttaattaagctctctcctgacaacccccagaattaaatgaaccatgattgtgaagagtaatttggtacaatgaaggcagtgtttgtttttaagttaaaggaaatgggctaaacataaagttcttattagataagtaaataactaaagaaagaatacaattactaaactctgatggctttgtattattttaaagaaatgaagtttaactttatacagtgaagctaagctaggcaagctcaagaaggaaaaaaaaatcttgaacattatttttttttgcctgacttacttattcattaaattttgaaggttttccacttgaagtaaattaggaaaggtaaagaagataacagaacaagtaaacacttaagaaaagtcaagctgaggccgggcagggtggctcacacctgtaatcctaacaaacactttgggaggccgagggaggcagctggattgcctgaactcaggagttcaagaccagcctggccaacatggtgaaacctcatctctactaaaatacaaaataattagctgggcgtggtggtatgcgctgtagtcccaggtactcgggaggctgaggcacgagaattgcttgagcccgggaggcagaggttgcagtgagccaagatcgcgccactgcacttcagcctgggtgacagagtgaggctgtcttctaaaaaatataaaaagtgaagttgggatttttggatttaaatggtacaaaaagaatatctcattttcccatgattaaagctaatcttcagatggaaagcttgcctggctacctagggtgcaccagagaatctgatccaatgcaagccagtcaatcctacaaatgtggtgagctagtcttccttcctatattttaataaatgtaaccaaaggccatctggaggtaggggaatgagaggtgaagaaacagaaaaatagaggttataaggatggaactaaaagttgtcagaagaggtatgagctgaagaaagaattactctcttttgaccaataaatacaattgggaaacactggaaaaccatggcttgattactgacaaccaacctgcctctctaaagagggtgtataaagggtgaaatacattagatttggctcagaaacagaatgcggtacttataaagcagaataaaggggagaacagtagtagttgatctaacccagattagacatgaataccagcatatgtttgcagagtcccacagttttgattcctcttataactttttgaggtgcaaaaggaaggtaccagaactggaatcacatgtaatcaatcagtgtgattttcccctcataccacacagccataggctgcagtgtggctgctgaagttcaattgatataaagtaaatcaggcttcaaaaagaatggtgctgtgggtacacaaggacataaagatgggaacgatagacactgaggactgcggcggggggagcgaggggagcggggagggcaagggctgaaagactatgtattgggtactatgctcacaacctggatgatgggatcattcataccacaaacctcagtatcacacaatatacccatgtaacaacctgcactctgcacatgtacccttagaatctaaaataaaagttgaaattattttttt

SEQ ID NO: 738 - protein, 223 aa, Homo sapiens
MLRSIPCKKCVVVGNGGVLKNKTLGEKIDSYDVIIRMNNGPVLGHEEEVGRRTTFRLFYPESVFSDPIHNDPNTTVILTAFKPHDLRWLLELLMGDKINTNGFWKKPALNLIYKPYQIRILDPFIIRTAAYELLHFPKVFPKNQKPKHPTTGIIAITLAFYICHEVHLAGFKYNFSDLKSPLHYYGNATMSLMNKNAYHNVTAEQLFLKDIIEKNLVINLTQD

SEQ ID NO: 739 - DNA, 3469 bp, Homo sapiens
aaaccttctgctgagccttgtgtcacagtcagtccgcggcgccacaagcctcagtgtttacttctgccgcctgccagccgggcggggaaggggagtacccggccacccctcactttagctcctgcagctttccaaacaaaccagggcgggatgggagtgtcttcttggctgtggaaatcgatcctcctaccttgtcctgaagccacccgccgcctttcctcgtccctcccttcgcggtgattttccggtcccggcgcccggcgagggcgcgcggctggtgtccgccccgcccgaaagggtggcacctgtggaaatgaaacggagaaataagatccagccttgtttatcaaagccagcttttgcctctctgctgagtcagagctctgcatatattttaagaaaaggcattgaggaactcaatcaaaccagtattcttttcacacaggtttcatcagtttcacccttttctgtgtgcggctgattttagaaagattgcttccttgtatggtagcgataagtttgatttgccctatgggatgagaacatcagcggaatattttcgacttgctctttcaaaactgcagagttgtgatctctttgatgagtttgacaagaaatcctggagtctgagataaaaggggatctcaacaaccctcaggattcagaagtgttactcagctcagtctattactcagtggctgcatcaattggaaatgctcagaagcataccctgtaaaaagtgtgtggtggttggtaatggaggagttttgaagaataagacattaggagaaaaaatcgactcctatgatgtaataataagaatgaataatggtcctgttttaggacatgaagaagaagttgggagaaggacaaccttccgacttttttatccagaatctgttttttcagatcctattcacaatgaccctaatacgacagtgattctcactgcttttaagccacatgatttaaggtggctgttggaattgttgatgggtgacaaaataaacactaatggtttttggaagaaaccagccttaaacctgatttataaaccttatcaaatccgaatattagatcctttcattatcagaacagcagcttatgaactgcttcattttccaaaagtgtttcccaaaaatcagaaacctaaacacccaacaacaggaattattgccatcacattggcgttttacatatgtcacgaagttcacctagctggttttaaatacaacttttctgacctcaagagtcctttgcactactatgggaatgccaccatgtctttgatgaataagaacgcgtatcacaatgtgactgcagagcagctctttttgaaggacattatagaaaaaaacctcgtaatcaacttgactcaagattgactctacagactcagaagatgatgctaacagtgttagttttatttttgtactgcaatttttagtttaaaatatgttggatgcactcgtcaaataattatgtatactgtctgttgctgcctggtgattcataaccaccagcttaatttctgtgaatactgtatatttaacttatgaaaaccaagaaatgtaaagataacaggaaaataagttttgattgcattgtttttaaaataagctagttttctgaggtgttttcacacgtctttttatagttacttcatcttagatttttgaagggatatgacttcctactaaggatttagtttaccacaacaattctgactacaataagacattttgaggaggatatttggctactgtaaacatggctggtggaaaatcacgattgtggcttgatgtggcaagccgaaaccacttggctctggaaatctaagttcatactggtttaattaagctctctcctgacaacccccagaattaaatgaaccatgattgtgaagagtaatttggtacaatgaaggcagtgtttgtttttaagttaaaggaaatgggctaaacataaagttcttattagataagtaaataactaaagaaagaatacaattactaaactctgatggctttgtattattttaaagaaatgaagtttaactttatacagtgaagctaagctaggcaagctcaagaaggaaaaaaaaatcttgaacattatttttttttgcctgacttacttattcattaaattttgaaggttttccacttgaagtaaattaggaaaggtaaagaagataacagaacaagtaaacacttaagaaaagtcaagctgaggccgggcagggtggctcacacctgtaatcctaacaaacactttgggaggccgagggaggcagctggattgcctgaactcaggagttcaagaccagcctggccaacatggtgaaacctcatctctactaaaatacaaaataattagctgggcgtggtggtatgcgctgtagtcccaggtactcgggaggctgaggcacgagaattgcttgagcccgggaggcagaggttgcagtgagccaagatcgcgccactgcacttcagcctgggtgacagagtgaggctgtcttctaaaaaatataaaaagtgaagttgggatttttggatttaaatggtacaaaaagaatatctcattttcccatgattaaagctaatcttcagatggaaagcttgcctggctacctagggtgcaccagagaatctgatccaatgcaagccagtcaatcctacaaatgtggtgagctagtcttccttcctatattttaataaatgtaaccaaaggccatctggaggtaggggaatgagaggtgaagaaacagaaaaatagaggttataaggatggaactaaaagttgtcagaagaggtatgagctgaagaaagaattactctcttttgaccaataaatacaattgggaaacactggaaaaccatggcttgattactgacaaccaacctgcctctctaaagagggtgtataaagggtgaaatacattagatttggctcagaaacagaatgcggtacttataaagcagaataaaggggagaacagtagtagttgatctaacccagattagacatgaataccagcatatgtttgcagagtcccacagttttgattcctcttataactttttgaggtgcaaaaggaaggtaccagaactggaatcacatgtaatcaatcagtgtgattttcccctcataccacacagccataggctgcagtgtggctgctgaagttcaattgatataaagtaaatcaggcttcaaaaagaatggtgctgtgggtacacaaggacataaagatgggaacgatagacactgaggactgcggcggggggagcgaggggagcggggagggcaagggctgaaagactatgtattgggtactatgctcacaacctggatgatgggatcattcataccacaaacctcagtatcacacaatatacccatgtaacaacctgcactctgcacatgtacccttagaatctaaaataaaagttgaaattattttttt

SEQ ID NO: 740 - protein, 223 aa, Homo sapiens; identical to SEQ ID NO: 738

SEQ ID NO: 741 - DNA, 3630 bp, Homo sapiens
aaaccttctgctgagccttgtgtcacagtcagtccgcggcgccacaagcctcagtgtttacttctgccgcctgccagccgggcggggaaggggagtacccggccacccctcactttagctcctgcagctttccaaacaaaccagggcgggatgggagtgtcttcttggctgtggaaatcgatcctcctaccttgtcctgaagccacccgccgcctttcctcgtccctcccttcgcggtgattttccggtcccggcgcccggcgagggcgcgcggctggtgtccgccccgcccgaaagcatttgcaagtgaggaagcagcacaaccctgggttttagataatttctaacagagaggccccagcaattcagcaggcagcgtcctgagtctttggcagcctggtccctctttcgcaaattctccacctttgcgaacagagggtctttaggacacagattcttaaaagtgcaggtgagccagccatgagagggtatcttgtggccatattcctgagtgctgtcttcctctattatgtactgcattgcatattatggggaacgaatgtctattgggtggcacctgtggaaatgaaacggagaaataagatccagccttgtttatcaaagccagcttttgcctctctgctgagtcagagctctgcatatattttaagaaaaggcattgaggaactcaatcaaaccagtattcttttcacacaggtttcatcagtttcacccttttctgtgtgcggctgattttagaaagattgcttccttgtatggtagcgataagtttgatttgccctatgggatgagaacatcagcggaatattttcgacttgctctttcaaaactgcagagttgtgatctctttgatgagtttgacaacataccctgtaaaaagtgtgtggtggttggtaatggaggagttttgaagaataagacattaggagaaaaaatcgactcctatgatgtaataataagaatgaataatggtcctgttttaggacatgaagaagaagttgggagaaggacaaccttccgacttttttatccagaatctgttttttcagatcctattcacaatgaccctaatacgacagtgattctcactgcttttaagccacatgatttaaggtggctgttggaattgttgatgggtgacaaaataaacactaatggtttttggaagaaaccagccttaaacctgatttataaaccttatcaaatccgaatattagatcctttcattatcagaacagcagcttatgaactgcttcattttccaaaagtgtttcccaaaaatcagaaacctaaacacccaacaacaggaattattgccatcacattggcgttttacatatgtcacgaagttcacctagctggttttaaatacaacttttctgacctcaagagtcctttgcactactatgggaatgccaccatgtctttgatgaataagaacgcgtatcacaatgtgactgcagagcagctctttttgaaggacattatagaaaaaaacctcgtaatcaacttgactcaagattgactctacagactcagaagatgatgctaacagtgttagttttatttttgtactgcaatttttagtttaaaatatgttggatgcactcgtcaaataattatgtatactgtctgttgctgcctggtgattcataaccaccagcttaatttctgtgaatactgtatatttaacttatgaaaaccaagaaatgtaaagataacaggaaaataagttttgattgcattgtttttaaaataagctagttttctgaggtgttttcacacgtctttttatagttacttcatcttagatttttgaagggatatgacttcctactaaggatttagtttaccacaacaattctgactacaataagacattttgaggaggatatttggctactgtaaacatggctggtggaaaatcacgattgtggcttgatgtggcaagccgaaaccacttggctctggaaatctaagttcatactggtttaattaagctctctcctgacaacccccagaattaaatgaaccatgattgtgaagagtaatttggtacaatgaaggcagtgtttgtttttaagttaaaggaaatgggctaaacataaagttcttattagataagtaaataactaaagaaagaatacaattactaaactctgatggctttgtattattttaaagaaatgaagtttaactttatacagtgaagctaagctaggcaagctcaagaaggaaaaaaaaatcttgaacattatttttttttgcctgacttacttattcattaaattttgaaggttttccacttgaagtaaattaggaaaggtaaagaagataacagaacaagtaaacacttaagaaaagtcaagctgaggccgggcagggtggctcacacctgtaatcctaacaaacactttgggaggccgagggaggcagctggattgcctgaactcaggagttcaagaccagcctggccaacatggtgaaacctcatctctactaaaatacaaaataattagctgggcgtggtggtatgcgctgtagtcccaggtactcgggaggctgaggcacgagaattgcttgagcccgggaggcagaggttgcagtgagccaagatcgcgccactgcacttcagcctgggtgacagagtgaggctgtcttctaaaaaatataaaaagtgaagttgggatttttggatttaaatggtacaaaaagaatatctcattttcccatgattaaagctaatcttcagatggaaagcttgcctggctacctagggtgcaccagagaatctgatccaatgcaagccagtcaatcctacaaatgtggtgagctagtcttccttcctatattttaataaatgtaaccaaaggccatctggaggtaggggaatgagaggtgaagaaacagaaaaatagaggttataaggatggaactaaaagttgtcagaagaggtatgagctgaagaaagaattactctcttttgaccaataaatacaattgggaaacactggaaaaccatggcttgattactgacaaccaacctgcctctctaaagagggtgtataaagggtgaaatacattagatttggctcagaaacagaatgcggtacttataaagcagaataaaggggagaacagtagtagttgatctaacccagattagacatgaataccagcatatgtttgcagagtcccacagttttgattcctcttataactttttgaggtgcaaaaggaaggtaccagaactggaatcacatgtaatcaatcagtgtgattttcccctcataccacacagccataggctgcagtgtggctgctgaagttcaattgatataaagtaaatcaggcttcaaaaagaatggtgctgtgggtacacaaggacataaagatgggaacgatagacactgaggactgcggcggggggagcgaggggagcggggagggcaagggctgaaagactatgtattgggtactatgctcacaacctggatgatgggatcattcataccacaaacctcagtatcacacaatatacccatgtaacaacctgcactctgcacatgtacccttagaatctaaaataaaagttgaaattattttttt

SEQ ID NO: 742 - protein, 245 aa, Homo sapiens; identical to SEQ ID NO: 724

SEQ ID NO: 743 - DNA, 3496 bp, Homo sapiens
aaaccttctgctgagccttgtgtcacagtcagtccgcggcgccacaagcctcagtgtttacttctgccgcctgccagccgggcggggaaggggagtacccggccacccctcactttagctcctgcagctttccaaacaaaccagggcgggatgggagtgtcttcttggctgtggaaatcgatcctcctaccttgtcctgaagccacccgccgcctttcctcgtccctcccttcgcggtgattttccggtcccggcgcccggcgagggcgcgcggctggtgtccgccccgcccgaaagcatttgcaagtgaggaagcagcacaaccctgggttttagataatttctaacagagaggccccagcaattcagcaggcagcgtcctgagtctttggcagcctggtccctctttcgcaaattctccacctttgcgaacagagggtctttaggacacagattcttaaaagtgcaggtgagccagccatgagagggtatcttgtggccatattcctgagtgctgtcttcctctattatgtactgcattgcatattatggggaacgaatgtctattgggtggcacctgtggaaatgaaacggagaaataagatccagccttgtttatcaaagccagcttttgcctctctgctgaggtttcatcagtttcacccttttctgtgtgcggctgattttagaaagattgcttccttgtatggtagcgataagtttgatttgccctatgggatgagaacatcagcataccctgtaaaaagtgtgtggtggttggtaatggaggagttttgaagaataagacattaggagaaaaaatcgactcctatgatgtaataataagaatgaataatggtcctgttttaggacatgaagaagaagttgggagaaggacaaccttccgacttttttatccagaatctgttttttcagatcctattcacaatgaccctaatacgacagtgattctcactgcttttaagccacatgatttaaggtggctgttggaattgttgatgggtgacaaaataaacactaatggtttttggaagaaaccagccttaaacctgatttataaaccttatcaaatccgaatattagatcctttcattatcagaacagcagcttatgaactgcttcattttccaaaagtgtttcccaaaaatcagaaacctaaacacccaacaacaggaattattgccatcacattggcgttttacatatgtcacgaagttcacctagctggttttaaatacaacttttctgacctcaagagtcctttgcactactatgggaatgccaccatgtctttgatgaataagaacgcgtatcacaatgtgactgcagagcagctctttttgaaggacattatagaaaaaaacctcgtaatcaacttgactcaagattgactctacagactcagaagatgatgctaacagtgttagttttatttttgtactgcaatttttagtttaaaatatgttggatgcactcgtcaaataattatgtatactgtctgttgctgcctggtgattcataaccaccagcttaatttctgtgaatactgtatatttaacttatgaaaaccaagaaatgtaaagataacaggaaaataagttttgattgcattgtttttaaaataagctagttttctgaggtgttttcacacgtctttttatagttacttcatcttagatttttgaagggatatgacttcctactaaggatttagtttaccacaacaattctgactacaataagacattttgaggaggatatttggctactgtaaacatggctggtggaaaatcacgattgtggcttgatgtggcaagccgaaaccacttggctctggaaatctaagttcatactggtttaattaagctctctcctgacaacccccagaattaaatgaaccatgattgtgaagagtaatttggtacaatgaaggcagtgtttgtttttaagttaaaggaaatgggctaaacataaagttcttattagataagtaaataactaaagaaagaatacaattactaaactctgatggctttgtattattttaaagaaatgaagtttaactttatacagtgaagctaagctaggcaagctcaagaaggaaaaaaaaatcttgaacattatttttttttgcctgacttacttattcattaaattttgaaggttttccacttgaagtaaattaggaaaggtaaagaagataacagaacaagtaaacacttaagaaaagtcaagctgaggccgggcagggtggctcacacctgtaatcctaacaaacactttgggaggccgagggaggcagctggattgcctgaactcaggagttcaagaccagcctggccaacatggtgaaacctcatctctactaaaatacaaaataattagctgggcgtggtggtatgcgctgtagtcccaggtactcgggaggctgaggcacgagaattgcttgagcccgggaggcagaggttgcagtgagccaagatcgcgccactgcacttcagcctgggtgacagagtgaggctgtcttctaaaaaatataaaaagtgaagttgggatttttggatttaaatggtacaaaaagaatatctcattttcccatgattaaagctaatcttcagatggaaagcttgcctggctacctagggtgcaccagagaatctgatccaatgcaagccagtcaatcctacaaatgtggtgagctagtcttccttcctatattttaataaatgtaaccaaaggccatctggaggtaggggaatgagaggtgaagaaacagaaaaatagaggttataaggatggaactaaaagttgtcagaagaggtatgagctgaagaaagaattactctcttttgaccaataaatacaattgggaaacactggaaaaccatggcttgattactgacaaccaacctgcctctctaaagagggtgtataaagggtgaaatacattagatttggctcagaaacagaatgcggtacttataaagcagaataaaggggagaacagtagtagttgatctaacccagattagacatgaataccagcatatgtttgcagagtcccacagttttgattcctcttataactttttgaggtgcaaaaggaaggtaccagaactggaatcacatgtaatcaatcagtgtgattttcccctcataccacacagccataggctgcagtgtggctgctgaagttcaattgatataaagtaaatcaggcttcaaaaagaatggtgctgtgggtacacaaggacataaagatgggaacgatagacactgaggactgcggcggggggagcgaggggagcggggagggcaagggctgaaagactatgtattgggtactatgctcacaacctggatgatgggatcattcataccacaaacctcagtatcacacaatatacccatgtaacaacctgcactctgcacatgtacccttagaatctaaaataaaagttgaaattattttttt

SEQ ID NO: 744 - protein, 187 aa, Homo sapiens; identical to SEQ ID NO: 732

SEQ ID NO: 745 - DNA, 3335 bp, Homo sapiens
gtcgcccgggattggggctggcgggagcctgagactccgggcagggctgctccctcctctgctcccccgccagatccgcggggaaggaatcgtgcccgcgccgcccctggcccgcgccaccttcctttggtttctgccggcctcgggcttctgcggcccgatgtggcaggcgccgcgagagaggcagcagccggctggagcagcggcccctcaggtctcggagcccggtgcgcctctgcggtcgtcgctcctgggcctcggcgggtcactcttgccggccggcttcgctgcgggtttgcactgcccgggtgagccagccatgagagggtatcttgtggccatattcctgagtgctgtcttcctctattatgtactgcattgcatattatggggaacgaatgtctattgggtggcacctgtggaaatgaaacggagaaataagatccagccttgtttatcaaagccagcttttgcctctctgctgaggtttcatcagtttcacccttttctgtgtgcggctgattttagaaagattgcttccttgtatggtagcgataagtttgatttgccctatgggatgagaacatcagcataccctgtaaaaagtgtgtggtggttggtaatggaggagttttgaagaataagacattaggagaaaaaatcgactcctatgatgtaataataagaatgaataatggtcctgttttaggacatgaagaagaagttgggagaaggacaaccttccgacttttttatccagaatctgttttttcagatcctattcacaatgaccctaatacgacagtgattctcactgcttttaagccacatgatttaaggtggctgttggaattgttgatgggtgacaaaataaacactaatggtttttggaagaaaccagccttaaacctgatttataaaccttatcaaatccgaatattagatcctttcattatcagaacagcagcttatgaactgcttcattttccaaaagtgtttcccaaaaatcagaaacctaaacacccaacaacaggaattattgccatcacattggcgttttacatatgtcacgaagttcacctagctggttttaaatacaacttttctgacctcaagagtcctttgcactactatgggaatgccaccatgtctttgatgaataagaacgcgtatcacaatgtgactgcagagcagctctttttgaaggacattatagaaaaaaacctcgtaatcaacttgactcaagattgactctacagactcagaagatgatgctaacagtgttagttttatttttgtactgcaatttttagtttaaaatatgttggatgcactcgtcaaataattatgtatactgtctgttgctgcctggtgattcataaccaccagcttaatttctgtgaatactgtatatttaacttatgaaaaccaagaaatgtaaagataacaggaaaataagttttgattgcattgtttttaaaataagctagttttctgaggtgttttcacacgtctttttatagttacttcatcttagatttttgaagggatatgacttcctactaaggatttagtttaccacaacaattctgactacaataagacattttgaggaggatatttggctactgtaaacatggctggtggaaaatcacgattgtggcttgatgtggcaagccgaaaccacttggctctggaaatctaagttcatactggtttaattaagctctctcctgacaacccccagaattaaatgaaccatgattgtgaagagtaatttggtacaatgaaggcagtgtttgtttttaagttaaaggaaatgggctaaacataaagttcttattagataagtaaataactaaagaaagaatacaattactaaactctgatggctttgtattattttaaagaaatgaagtttaactttatacagtgaagctaagctaggcaagctcaagaaggaaaaaaaaatcttgaacattatttttttttgcctgacttacttattcattaaattttgaaggttttccacttgaagtaaattaggaaaggtaaagaagataacagaacaagtaaacacttaagaaaagtcaagctgaggccgggcagggtggctcacacctgtaatcctaacaaacactttgggaggccgagggaggcagctggattgcctgaactcaggagttcaagaccagcctggccaacatggtgaaacctcatctctactaaaatacaaaataattagctgggcgtggtggtatgcgctgtagtcccaggtactcgggaggctgaggcacgagaattgcttgagcccgggaggcagaggttgcagtgagccaagatcgcgccactgcacttcagcctgggtgacagagtgaggctgtcttctaaaaaatataaaaagtgaagttgggatttttggatttaaatggtacaaaaagaatatctcattttcccatgattaaagctaatcttcagatggaaagcttgcctggctacctagggtgcaccagagaatctgatccaatgcaagccagtcaatcctacaaatgtggtgagctagtcttccttcctatattttaataaatgtaaccaaaggccatctggaggtaggggaatgagaggtgaagaaacagaaaaatagaggttataaggatggaactaaaagttgtcagaagaggtatgagctgaagaaagaattactctcttttgaccaataaatacaattgggaaacactggaaaaccatggcttgattactgacaaccaacctgcctctctaaagagggtgtataaagggtgaaatacattagatttggctcagaaacagaatgcggtacttataaagcagaataaaggggagaacagtagtagttgatctaacccagattagacatgaataccagcatatgtttgcagagtcccacagttttgattcctcttataactttttgaggtgcaaaaggaaggtaccagaactggaatcacatgtaatcaatcagtgtgattttcccctcataccacacagccataggctgcagtgtggctgctgaagttcaattgatataaagtaaatcaggcttcaaaaagaatggtgctgtgggtacacaaggacataaagatgggaacgatagacactgaggactgcggcggggggagcgaggggagcggggagggcaagggctgaaagactatgtattgggtactatgctcacaacctggatgatgggatcattcataccacaaacctcagtatcacacaatatacccatgtaacaacctgcactctgcacatgtacccttagaatctaaaataaaagttgaaattattttttt

SEQ ID NO: 746 - protein, 187 aa, Homo sapiens; identical to SEQ ID NO: 732

SEQ ID NO: 747 - DNA, 3507 bp, Homo sapiens
gtcgcccgggattggggctggcgggagcctgagactccgggcagggctgctccctcctctgctcccccgccagatccgcggggaaggaatcgtgcccgcgccgcccctggcccgcgccaccttcctttggtttctgccggcctcgggcttctgcggcccgatgtggcaggcgccgcgagagaggcagcagccggctggagcagcggcccctcaggtctcggagcccggtgcgcctctgcggtcgtcgctcctgggcctcggcgggtcactcttgccggccggcttcgctgcgggtttgcactgcccggcatttgcaagtgaggaagcagcacaaccctgggttttagataatttctaacagagaggccccagcaattcagcaggcagcgtcctgagtctttggcagcctggtccctctttcgcaaattctccacctttgcgaacagagggtctttaggacacagattcttaaaagtgcaggtgagccagccatgagagggtatcttgtggccatattcctgagtgctgtcttcctctattatgtactgcattgcatattatggggaacgaatgtctattgggtggcacctgtggaaatgaaacggagaaataagatccagccttgtttatcaaagccagcttttgcctctctgctgaggtttcatcagtttcacccttttctgtgtgcggctgattttagaaagattgcttccttgtatggtagcgataagtttgatttgccctatgggatgagaacatcagcataccctgtaaaaagtgtgtggtggttggtaatggaggagttttgaagaataagacattaggagaaaaaatcgactcctatgatgtaataataagaatgaataatggtcctgttttaggacatgaagaagaagttgggagaaggacaaccttccgacttttttatccagaatctgttttttcagatcctattcacaatgaccctaatacgacagtgattctcactgcttttaagccacatgatttaaggtggctgttggaattgttgatgggtgacaaaataaacactaatggtttttggaagaaaccagccttaaacctgatttataaaccttatcaaatccgaatattagatcctttcattatcagaacagcagcttatgaactgcttcattttccaaaagtgtttcccaaaaatcagaaacctaaacacccaacaacaggaattattgccatcacattggcgttttacatatgtcacgaagttcacctagctggttttaaatacaacttttctgacctcaagagtcctttgcactactatgggaatgccaccatgtctttgatgaataagaacgcgtatcacaatgtgactgcagagcagctctttttgaaggacattatagaaaaaaacctcgtaatcaacttgactcaagattgactctacagactcagaagatgatgctaacagtgttagttttatttttgtactgcaatttttagtttaaaatatgttggatgcactcgtcaaataattatgtatactgtctgttgctgcctggtgattcataaccaccagcttaatttctgtgaatactgtatatttaacttatgaaaaccaagaaatgtaaagataacaggaaaataagttttgattgcattgtttttaaaataagctagttttctgaggtgttttcacacgtctttttatagttacttcatcttagatttttgaagggatatgacttcctactaaggatttagtttaccacaacaattctgactacaataagacattttgaggaggatatttggctactgtaaacatggctggtggaaaatcacgattgtggcttgatgtggcaagccgaaaccacttggctctggaaatctaagttcatactggtttaattaagctctctcctgacaacccccagaattaaatgaaccatgattgtgaagagtaatttggtacaatgaaggcagtgtttgtttttaagttaaaggaaatgggctaaacataaagttcttattagataagtaaataactaaagaaagaatacaattactaaactctgatggctttgtattattttaaagaaatgaagtttaactttatacagtgaagctaagctaggcaagctcaagaaggaaaaaaaaatcttgaacattatttttttttgcctgacttacttattcattaaattttgaaggttttccacttgaagtaaattaggaaaggtaaagaagataacagaacaagtaaacacttaagaaaagtcaagctgaggccgggcagggtggctcacacctgtaatcctaacaaacactttgggaggccgagggaggcagctggattgcctgaactcaggagttcaagaccagcctggccaacatggtgaaacctcatctctactaaaatacaaaataattagctgggcgtggtggtatgcgctgtagtcccaggtactcgggaggctgaggcacgagaattgcttgagcccgggaggcagaggttgcagtgagccaagatcgcgccactgcacttcagcctgggtgacagagtgaggctgtcttctaaaaaatataaaaagtgaagttgggatttttggatttaaatggtacaaaaagaatatctcattttcccatgattaaagctaatcttcagatggaaagcttgcctggctacctagggtgcaccagagaatctgatccaatgcaagccagtcaatcctacaaatgtggtgagctagtcttccttcctatattttaataaatgtaaccaaaggccatctggaggtaggggaatgagaggtgaagaaacagaaaaatagaggttataaggatggaactaaaagttgtcagaagaggtatgagctgaagaaagaattactctcttttgaccaataaatacaattgggaaacactggaaaaccatggcttgattactgacaaccaacctgcctctctaaagagggtgtataaagggtgaaatacattagatttggctcagaaacagaatgcggtacttataaagcagaataaaggggagaacagtagtagttgatctaacccagattagacatgaataccagcatatgtttgcagagtcccacagttttgattcctcttataactttttgaggtgcaaaaggaaggtaccagaactggaatcacatgtaatcaatcagtgtgattttcccctcataccacacagccataggctgcagtgtggctgctgaagttcaattgatataaagtaaatcaggcttcaaaaagaatggtgctgtgggtacacaaggacataaagatgggaacgatagacactgaggactgcggcggggggagcgaggggagcggggagggcaagggctgaaagactatgtattgggtactatgctcacaacctggatgatgggatcattcataccacaaacctcagtatcacacaatatacccatgtaacaacctgcactctgcacatgtacccttagaatctaaaataaaagttgaaattattttttt

SEQ ID NO: 748 - protein, 187 aa, Homo sapiens; identical to SEQ ID NO: 732

SEQ ID NO: 749 - DNA, 3399 bp, Homo sapiens
acgcgaggagggttgaggggtctggaaggttctggtctcttaccgtataaagtttttcgagaaaccctttttccctccacaatggaactagacctaacaaaacaagctccgaggcagtttaggagaaaggaggacgcatttgcaagtgaggaagcagcacaaccctgggttttagataatttctaacagagaggccccagcaattcagcaggcagcgtcctgagtctttggcagcctggtccctctttcgcaaattctccacctttgcgaacagagggtctttaggacacagattcttaaaagtgcaggtgagccagccatgagagggtatcttgtggccatattcctgagtgctgtcttcctctattatgtactgcattgcatattatggggaacgaatgtctattgggtggcacctgtggaaatgaaacggagaaataagatccagccttgtttatcaaagccagcttttgcctctctgctgaggtttcatcagtttcacccttttctgtgtgcggctgattttagaaagattgcttccttgtatggtagcgataagtttgatttgccctatgggatgagaacatcagcggaatattttcgacttgctctttcaaaactgcagagttgtgatctctttgatgagtttgacaacataccctgtaaaaagtgtgtggtggttggtaatggaggagttttgaagaataagacattaggagaaaaaatcgactcctatgatgtaataataagaatgaataatggtcctgttttaggacatgaagaagaagttgggagaaggacaaccttccgacttttttatccagaatctgttttttcagatcctattcacaatgaccctaatacgacagtgattctcactgcttttaagccacatgatttaaggtggctgttggaattgttgatgggtgacaaaataaacactaatggtttttggaagaaaccagccttaaacctgatttataaaccttatcaaatccgaatattagatcctttcattatcagaacagcagcttatgaactgcttcattttccaaaagtgtttcccaaaaatcagaaacctaaacacccaacaacaggaattattgccatcacattggcgttttacatatgtcacgaagttcacctagctggttttaaatacaacttttctgacctcaagagtcctttgcactactatgggaatgccaccatgtctttgatgaataagaacgcgtatcacaatgtgactgcagagcagctctttttgaaggacattatagaaaaaaacctcgtaatcaacttgactcaagattgactctacagactcagaagatgatgctaacagtgttagttttatttttgtactgcaatttttagtttaaaatatgttggatgcactcgtcaaataattatgtatactgtctgttgctgcctggtgattcataaccaccagcttaatttctgtgaatactgtatatttaacttatgaaaaccaagaaatgtaaagataacaggaaaataagttttgattgcattgtttttaaaataagctagttttctgaggtgttttcacacgtctttttatagttacttcatcttagatttttgaagggatatgacttcctactaaggatttagtttaccacaacaattctgactacaataagacattttgaggaggatatttggctactgtaaacatggctggtggaaaatcacgattgtggcttgatgtggcaagccgaaaccacttggctctggaaatctaagttcatactggtttaattaagctctctcctgacaacccccagaattaaatgaaccatgattgtgaagagtaatttggtacaatgaaggcagtgtttgtttttaagttaaaggaaatgggctaaacataaagttcttattagataagtaaataactaaagaaagaatacaattactaaactctgatggctttgtattattttaaagaaatgaagtttaactttatacagtgaagctaagctaggcaagctcaagaaggaaaaaaaaatcttgaacattatttttttttgcctgacttacttattcattaaattttgaaggttttccacttgaagtaaattaggaaaggtaaagaagataacagaacaagtaaacacttaagaaaagtcaagctgaggccgggcagggtggctcacacctgtaatcctaacaaacactttgggaggccgagggaggcagctggattgcctgaactcaggagttcaagaccagcctggccaacatggtgaaacctcatctctactaaaatacaaaataattagctgggcgtggtggtatgcgctgtagtcccaggtactcgggaggctgaggcacgagaattgcttgagcccgggaggcagaggttgcagtgagccaagatcgcgccactgcacttcagcctgggtgacagagtgaggctgtcttctaaaaaatataaaaagtgaagttgggatttttggatttaaatggtacaaaaagaatatctcattttcccatgattaaagctaatcttcagatggaaagcttgcctggctacctagggtgcaccagagaatctgatccaatgcaagccagtcaatcctacaaatgtggtgagctagtcttccttcctatattttaataaatgtaaccaaaggccatctggaggtaggggaatgagaggtgaagaaacagaaaaatagaggttataaggatggaactaaaagttgtcagaagaggtatgagctgaagaaagaattactctcttttgaccaataaatacaattgggaaacactggaaaaccatggcttgattactgacaaccaacctgcctctctaaagagggtgtataaagggtgaaatacattagatttggctcagaaacagaatgcggtacttataaagcagaataaaggggagaacagtagtagttgatctaacccagattagacatgaataccagcatatgtttgcagagtcccacagttttgattcctcttataactttttgaggtgcaaaaggaaggtaccagaactggaatcacatgtaatcaatcagtgtgattttcccctcataccacacagccataggctgcagtgtggctgctgaagttcaattgatataaagtaaatcaggcttcaaaaagaatggtgctgtgggtacacaaggacataaagatgggaacgatagacactgaggactgcggcggggggagcgaggggagcggggagggcaagggctgaaagactatgtattgggtactatgctcacaacctggatgatgggatcattcataccacaaacctcagtatcacacaatatacccatgtaacaacctgcactctgcacatgtacccttagaatctaaaataaaagttgaaattattttttt

SEQ ID NO: 750 - protein, 331 aa, Homo sapiens; identical to SEQ ID NO: 728

SEQ ID NO: 751 - DNA, 3469 bp, Homo sapiens
acgcgaggagggttgaggggtctggaaggttctggtctcttaccgtataaagtttttcgagaaaccctttttccctccacaatggaactagacctaacaaaacaagctccgaggcagtttaggagaaaggaggacgcatttgcaagtgaggaagcagcacaaccctgggttttagataatttctaacagagaggccccagcaattcagcaggcagcgtcctgagtctttggcagcctggtccctctttcgcaaattctccacctttgcgaacagagggtctttaggacacagattcttaaaagtgcaggtgagccagccatgagagggtatcttgtggccatattcctgagtgctgtcttcctctattatgtactgcattgcatattatggggaacgaatgtctattgggtggcacctgtggaaatgaaacggagaaataagatccagccttgtttatcaaagccagcttttgcctctctgctgagtcagagctctgcatatattttaagaaaaggcattgaggaactcaatcaaaccagtattcttttcacacaggtttcatcagtttcacccttttctgtgtgcggctgattttagaaagattgcttccttgtatggtagcgataagtttgatttgccctatgggatgagaacatcagcggaatattttcgacttgctctttcaaaactgcagagttgtgatctctttgatgagtttgacaacataccctgtaaaaagtgtgtggtggttggtaatggaggagttttgaagaataagacattaggagaaaaaatcgactcctatgatgtaataataagaatgaataatggtcctgttttaggacatgaagaagaagttgggagaaggacaaccttccgacttttttatccagaatctgttttttcagatcctattcacaatgaccctaatacgacagtgattctcactgcttttaagccacatgatttaaggtggctgttggaattgttgatgggtgacaaaataaacactaatggtttttggaagaaaccagccttaaacctgatttataaaccttatcaaatccgaatattagatcctttcattatcagaacagcagcttatgaactgcttcattttccaaaagtgtttcccaaaaatcagaaacctaaacacccaacaacaggaattattgccatcacattggcgttttacatatgtcacgaagttcacctagctggttttaaatacaacttttctgacctcaagagtcctttgcactactatgggaatgccaccatgtctttgatgaataagaacgcgtatcacaatgtgactgcagagcagctctttttgaaggacattatagaaaaaaacctcgtaatcaacttgactcaagattgactctacagactcagaagatgatgctaacagtgttagttttatttttgtactgcaatttttagtttaaaatatgttggatgcactcgtcaaataattatgtatactgtctgttgctgcctggtgattcataaccaccagcttaatttctgtgaatactgtatatttaacttatgaaaaccaagaaatgtaaagataacaggaaaataagttttgattgcattgtttttaaaataagctagttttctgaggtgttttcacacgtctttttatagttacttcatcttagatttttgaagggatatgacttcctactaaggatttagtttaccacaacaattctgactacaataagacattttgaggaggatatttggctactgtaaacatggctggtggaaaatcacgattgtggcttgatgtggcaagccgaaaccacttggctctggaaatctaagttcatactggtttaattaagctctctcctgacaacccccagaattaaatgaaccatgattgtgaagagtaatttggtacaatgaaggcagtgtttgtttttaagttaaaggaaatgggctaaacataaagttcttattagataagtaaataactaaagaaagaatacaattactaaactctgatggctttgtattattttaaagaaatgaagtttaactttatacagtgaagctaagctaggcaagctcaagaaggaaaaaaaaatcttgaacattatttttttttgcctgacttacttattcattaaattttgaaggttttccacttgaagtaaattaggaaaggtaaagaagataacagaacaagtaaacacttaagaaaagtcaagctgaggccgggcagggtggctcacacctgtaatcctaacaaacactttgggaggccgagggaggcagctggattgcctgaactcaggagttcaagaccagcctggccaacatggtgaaacctcatctctactaaaatacaaaataattagctgggcgtggtggtatgcgctgtagtcccaggtactcgggaggctgaggcacgagaattgcttgagcccgggaggcagaggttgcagtgagccaagatcgcgccactgcacttcagcctgggtgacagagtgaggctgtcttctaaaaaatataaaaagtgaagttgggatttttggatttaaatggtacaaaaagaatatctcattttcccatgattaaagctaatcttcagatggaaagcttgcctggctacctagggtgcaccagagaatctgatccaatgcaagccagtcaatcctacaaatgtggtgagctagtcttccttcctatattttaataaatgtaaccaaaggccatctggaggtaggggaatgagaggtgaagaaacagaaaaatagaggttataaggatggaactaaaagttgtcagaagaggtatgagctgaagaaagaattactctcttttgaccaataaatacaattgggaaacactggaaaaccatggcttgattactgacaaccaacctgcctctctaaagagggtgtataaagggtgaaatacattagatttggctcagaaacagaatgcggtacttataaagcagaataaaggggagaacagtagtagttgatctaacccagattagacatgaataccagcatatgtttgcagagtcccacagttttgattcctcttataactttttgaggtgcaaaaggaaggtaccagaactggaatcacatgtaatcaatcagtgtgattttcccctcataccacacagccataggctgcagtgtggctgctgaagttcaattgatataaagtaaatcaggcttcaaaaagaatggtgctgtgggtacacaaggacataaagatgggaacgatagacactgaggactgcggcggggggagcgaggggagcggggagggcaagggctgaaagactatgtattgggtactatgctcacaacctggatgatgggatcattcataccacaaacctcagtatcacacaatatacccatgtaacaacctgcactctgcacatgtacccttagaatctaaaataaaagttgaaattattttttt

SEQ ID NO: 752 - protein, 245 aa, Homo sapiens; identical to SEQ ID NO: 724

SEQ ID NO: 753 - DNA, 3216 bp, Homo sapiens
tggccatgttccacacagtctggagtgtatgtcagtgtgagctgaagaccagcagagactaggatggatgacggcctgtccaggggctgaatggacacaggtgtcagcagggccacctggtaaaggtgagccagccatgagagggtatcttgtggccatattcctgagtgctgtcttcctctattatgtactgcattgcatattatggggaacgaatgtctattgggtggcacctgtggaaatgaaacggagaaataagatccagccttgtttatcaaagccagcttttgcctctctgctgaggtttcatcagtttcacccttttctgtgtgcggctgattttagaaagattgcttccttgtatggtagcgataagtttgatttgccctatgggatgagaacatcagcggaatattttcgacttgctctttcaaaactgcagagttgtgatctctttgatgagtttgacaacataccctgtaaaaagtgtgtggtggttggtaatggaggagttttgaagaataagacattaggagaaaaaatcgactcctatgatgtaataataagaatgaataatggtcctgttttaggacatgaagaagaagttgggagaaggacaaccttccgacttttttatccagaatctgttttttcagatcctattcacaatgaccctaatacgacagtgattctcactgcttttaagccacatgatttaaggtggctgttggaattgttgatgggtgacaaaataaacactaatggtttttggaagaaaccagccttaaacctgatttataaaccttatcaaatccgaatattagatcctttcattatcagaacagcagcttatgaactgcttcattttccaaaagtgtttcccaaaaatcagaaacctaaacacccaacaacaggaattattgccatcacattggcgttttacatatgtcacgaagttcacctagctggttttaaatacaacttttctgacctcaagagtcctttgcactactatgggaatgccaccatgtctttgatgaataagaacgcgtatcacaatgtgactgcagagcagctctttttgaaggacattatagaaaaaaacctcgtaatcaacttgactcaagattgactctacagactcagaagatgatgctaacagtgttagttttatttttgtactgcaatttttagtttaaaatatgttggatgcactcgtcaaataattatgtatactgtctgttgctgcctggtgattcataaccaccagcttaatttctgtgaatactgtatatttaacttatgaaaaccaagaaatgtaaagataacaggaaaataagttttgattgcattgtttttaaaataagctagttttctgaggtgttttcacacgtctttttatagttacttcatcttagatttttgaagggatatgacttcctactaaggatttagtttaccacaacaattctgactacaataagacattttgaggaggatatttggctactgtaaacatggctggtggaaaatcacgattgtggcttgatgtggcaagccgaaaccacttggctctggaaatctaagttcatactggtttaattaagctctctcctgacaacccccagaattaaatgaaccatgattgtgaagagtaatttggtacaatgaaggcagtgtttgtttttaagttaaaggaaatgggctaaacataaagttcttattagataagtaaataactaaagaaagaatacaattactaaactctgatggctttgtattattttaaagaaatgaagtttaactttatacagtgaagctaagctaggcaagctcaagaaggaaaaaaaaatcttgaacattatttttttttgcctgacttacttattcattaaattttgaaggttttccacttgaagtaaattaggaaaggtaaagaagataacagaacaagtaaacacttaagaaaagtcaagctgaggccgggcagggtggctcacacctgtaatcctaacaaacactttgggaggccgagggaggcagctggattgcctgaactcaggagttcaagaccagcctggccaacatggtgaaacctcatctctactaaaatacaaaataattagctgggcgtggtggtatgcgctgtagtcccaggtactcgggaggctgaggcacgagaattgcttgagcccgggaggcagaggttgcagtgagccaagatcgcgccactgcacttcagcctgggtgacagagtgaggctgtcttctaaaaaatataaaaagtgaagttgggatttttggatttaaatggtacaaaaagaatatctcattttcccatgattaaagctaatcttcagatggaaagcttgcctggctacctagggtgcaccagagaatctgatccaatgcaagccagtcaatcctacaaatgtggtgagctagtcttccttcctatattttaataaatgtaaccaaaggccatctggaggtaggggaatgagaggtgaagaaacagaaaaatagaggttataaggatggaactaaaagttgtcagaagaggtatgagctgaagaaagaattactctcttttgaccaataaatacaattgggaaacactggaaaaccatggcttgattactgacaaccaacctgcctctctaaagagggtgtataaagggtgaaatacattagatttggctcagaaacagaatgcggtacttataaagcagaataaaggggagaacagtagtagttgatctaacccagattagacatgaataccagcatatgtttgcagagtcccacagttttgattcctcttataactttttgaggtgcaaaaggaaggtaccagaactggaatcacatgtaatcaatcagtgtgattttcccctcataccacacagccataggctgcagtgtggctgctgaagttcaattgatataaagtaaatcaggcttcaaaaagaatggtgctgtgggtacacaaggacataaagatgggaacgatagacactgaggactgcggcggggggagcgaggggagcggggagggcaagggctgaaagactatgtattgggtactatgctcacaacctggatgatgggatcattcataccacaaacctcagtatcacacaatatacccatgtaacaacctgcactctgcacatgtacccttagaatctaaaataaaagttgaaattattttttt

SEQ ID NO: 754 - protein, 354 aa, Homo sapiens
MTACPGAEWTQVSAGPPGKGEPAMRGYLVAIFLSAVFLYYVLHCILWGTNVYWVAPVEMKRRNKIQPCLSKPAFASLLRFHQFHPFLCAADFRKIASLYGSDKFDLPYGMRTSAEYFRLALSKLQSCDLFDEFDNIPCKKCVVVGNGGVLKNKTLGEKIDSYDVIIRMNNGPVLGHEEEVGRRTTFRLFYPESVFSDPIHNDPNTTVILTAFKPHDLRWLLELLMGDKINTNGFWKKPALNLIYKPYQIRILDPFIIRTAAYELLHFPKVFPKNQKPKHPTTGIIAITLAFYICHEVHLAGFKYNFSDLKSPLHYYGNATMSLMNKNAYHNVTAEQLFLKDIIEKNLVINLTQD

SEQ ID NO: 755 - DNA, 3224 bp, Homo sapiens
tggccatgttccacacagtctggagtgtatgtcagtgtgagctgaagaccagcagagactaggatggatgacggcctgtccaggggctgaatggacacaggtgtcagcagggccacctggtaaaggtatggaggtgagccagccatgagagggtatcttgtggccatattcctgagtgctgtcttcctctattatgtactgcattgcatattatggggaacgaatgtctattgggtggcacctgtggaaatgaaacggagaaataagatccagccttgtttatcaaagccagcttttgcctctctgctgaggtttcatcagtttcacccttttctgtgtgcggctgattttagaaagattgcttccttgtatggtagcgataagtttgatttgccctatgggatgagaacatcagcggaatattttcgacttgctctttcaaaactgcagagttgtgatctctttgatgagtttgacaacataccctgtaaaaagtgtgtggtggttggtaatggaggagttttgaagaataagacattaggagaaaaaatcgactcctatgatgtaataataagaatgaataatggtcctgttttaggacatgaagaagaagttgggagaaggacaaccttccgacttttttatccagaatctgttttttcagatcctattcacaatgaccctaatacgacagtgattctcactgcttttaagccacatgatttaaggtggctgttggaattgttgatgggtgacaaaataaacactaatggtttttggaagaaaccagccttaaacctgatttataaaccttatcaaatccgaatattagatcctttcattatcagaacagcagcttatgaactgcttcattttccaaaagtgtttcccaaaaatcagaaacctaaacacccaacaacaggaattattgccatcacattggcgttttacatatgtcacgaagttcacctagctggttttaaatacaacttttctgacctcaagagtcctttgcactactatgggaatgccaccatgtctttgatgaataagaacgcgtatcacaatgtgactgcagagcagctctttttgaaggacattatagaaaaaaacctcgtaatcaacttgactcaagattgactctacagactcagaagatgatgctaacagtgttagttttatttttgtactgcaatttttagtttaaaatatgttggatgcactcgtcaaataattatgtatactgtctgttgctgcctggtgattcataaccaccagcttaatttctgtgaatactgtatatttaacttatgaaaaccaagaaatgtaaagataacaggaaaataagttttgattgcattgtttttaaaataagctagttttctgaggtgttttcacacgtctttttatagttacttcatcttagatttttgaagggatatgacttcctactaaggatttagtttaccacaacaattctgactacaataagacattttgaggaggatatttggctactgtaaacatggctggtggaaaatcacgattgtggcttgatgtggcaagccgaaaccacttggctctggaaatctaagttcatactggtttaattaagctctctcctgacaacccccagaattaaatgaaccatgattgtgaagagtaatttggtacaatgaaggcagtgtttgtttttaagttaaaggaaatgggctaaacataaagttcttattagataagtaaataactaaagaaagaatacaattactaaactctgatggctttgtattattttaaagaaatgaagtttaactttatacagtgaagctaagctaggcaagctcaagaaggaaaaaaaaatcttgaacattatttttttttgcctgacttacttattcattaaattttgaaggttttccacttgaagtaaattaggaaaggtaaagaagataacagaacaagtaaacacttaagaaaagtcaagctgaggccgggcagggtggctcacacctgtaatcctaacaaacactttgggaggccgagggaggcagctggattgcctgaactcaggagttcaagaccagcctggccaacatggtgaaacctcatctctactaaaatacaaaataattagctgggcgtggtggtatgcgctgtagtcccaggtactcgggaggctgaggcacgagaattgcttgagcccgggaggcagaggttgcagtgagccaagatcgcgccactgcacttcagcctgggtgacagagtgaggctgtcttctaaaaaatataaaaagtgaagttgggatttttggatttaaatggtacaaaaagaatatctcattttcccatgattaaagctaatcttcagatggaaagcttgcctggctacctagggtgcaccagagaatctgatccaatgcaagccagtcaatcctacaaatgtggtgagctagtcttccttcctatattttaataaatgtaaccaaaggccatctggaggtaggggaatgagaggtgaagaaacagaaaaatagaggttataaggatggaactaaaagttgtcagaagaggtatgagctgaagaaagaattactctcttttgaccaataaatacaattgggaaacactggaaaaccatggcttgattactgacaaccaacctgcctctctaaagagggtgtataaagggtgaaatacattagatttggctcagaaacagaatgcggtacttataaagcagaataaaggggagaacagtagtagttgatctaacccagattagacatgaataccagcatatgtttgcagagtcccacagttttgattcctcttataactttttgaggtgcaaaaggaaggtaccagaactggaatcacatgtaatcaatcagtgtgattttcccctcataccacacagccataggctgcagtgtggctgctgaagttcaattgatataaagtaaatcaggcttcaaaaagaatggtgctgtgggtacacaaggacataaagatgggaacgatagacactgaggactgcggcggggggagcgaggggagcggggagggcaagggctgaaagactatgtattgggtactatgctcacaacctggatgatgggatcattcataccacaaacctcagtatcacacaatatacccatgtaacaacctgcactctgcacatgtacccttagaatctaaaataaaagttgaaattattttttt

SEQ ID NO: 756 - protein, 331 aa, Homo sapiens; identical to SEQ ID NO: 728

SEQ ID NO: 757 - DNA, 3571 bp, Homo sapiens
gtcgcccgggattggggctggcgggagcctgagactccgggcagggctgctccctcctctgctcccccgccagatccgcggggaaggaatcgtgcccgcgccgcccctggcccgcgccaccttcctttggtttctgccggcctcgggcttctgcggcccgatgtggcaggcgccgcgagagaggcagcagccggctggagcagcggcccctcaggtctcggagcccggtgcgcctctgcggtcgtcgctcctgggcctcggcgggtcactcttgccggccggcttcgctgcgggtttgcactgcccggcatttgcaagtgaggaagcagcacaaccctgggttttagataatttctaacagagaggccccagcaattcagcaggcagcgtcctgagtctttggcagcctggtccctctttcgcaaattctccacctttgcgaacagagggtctttaggacacagattcttaaaagtgcaggtgagccagccatgagagggtatcttgtggccatattcctgagtgctgtcttcctctattatgtactgcattgcatattatggggaacgaatgtctattgggtggcacctgtggaaatgaaacggagaaataagatccagccttgtttatcaaagccagcttttgcctctctgctgaggtttcatcagtttcacccttttctgtgtgcggctgattttagaaagattgcttccttgtatggtagcgataagtttgatttgccctatgggatgagaacatcagcggaatattttcgacttgctctttcaaaactgcagagttgtgatctctttgatgagtttgacaacataccctgtaaaaagtgtgtggtggttggtaatggaggagttttgaagaataagacattaggagaaaaaatcgactcctatgatgtaataataagaatgaataatggtcctgttttaggacatgaagaagaagttgggagaaggacaaccttccgacttttttatccagaatctgttttttcagatcctattcacaatgaccctaatacgacagtgattctcactgcttttaagccacatgatttaaggtggctgttggaattgttgatgggtgacaaaataaacactaatggtttttggaagaaaccagccttaaacctgatttataaaccttatcaaatccgaatattagatcctttcattatcagaacagcagcttatgaactgcttcattttccaaaagtgtttcccaaaaatcagaaacctaaacacccaacaacaggaattattgccatcacattggcgttttacatatgtcacgaagttcacctagctggttttaaatacaacttttctgacctcaagagtcctttgcactactatgggaatgccaccatgtctttgatgaataagaacgcgtatcacaatgtgactgcagagcagctctttttgaaggacattatagaaaaaaacctcgtaatcaacttgactcaagattgactctacagactcagaagatgatgctaacagtgttagttttatttttgtactgcaatttttagtttaaaatatgttggatgcactcgtcaaataattatgtatactgtctgttgctgcctggtgattcataaccaccagcttaatttctgtgaatactgtatatttaacttatgaaaaccaagaaatgtaaagataacaggaaaataagttttgattgcattgtttttaaaataagctagttttctgaggtgttttcacacgtctttttatagttacttcatcttagatttttgaagggatatgacttcctactaaggatttagtttaccacaacaattctgactacaataagacattttgaggaggatatttggctactgtaaacatggctggtggaaaatcacgattgtggcttgatgtggcaagccgaaaccacttggctctggaaatctaagttcatactggtttaattaagctctctcctgacaacccccagaattaaatgaaccatgattgtgaagagtaatttggtacaatgaaggcagtgtttgtttttaagttaaaggaaatgggctaaacataaagttcttattagataagtaaataactaaagaaagaatacaattactaaactctgatggctttgtattattttaaagaaatgaagtttaactttatacagtgaagctaagctaggcaagctcaagaaggaaaaaaaaatcttgaacattatttttttttgcctgacttacttattcattaaattttgaaggttttccacttgaagtaaattaggaaaggtaaagaagataacagaacaagtaaacacttaagaaaagtcaagctgaggccgggcagggtggctcacacctgtaatcctaacaaacactttgggaggccgagggaggcagctggattgcctgaactcaggagttcaagaccagcctggccaacatggtgaaacctcatctctactaaaatacaaaataattagctgggcgtggtggtatgcgctgtagtcccaggtactcgggaggctgaggcacgagaattgcttgagcccgggaggcagaggttgcagtgagccaagatcgcgccactgcacttcagcctgggtgacagagtgaggctgtcttctaaaaaatataaaaagtgaagttgggatttttggatttaaatggtacaaaaagaatatctcattttcccatgattaaagctaatcttcagatggaaagcttgcctggctacctagggtgcaccagagaatctgatccaatgcaagccagtcaatcctacaaatgtggtgagctagtcttccttcctatattttaataaatgtaaccaaaggccatctggaggtaggggaatgagaggtgaagaaacagaaaaatagaggttataaggatggaactaaaagttgtcagaagaggtatgagctgaagaaagaattactctcttttgaccaataaatacaattgggaaacactggaaaaccatggcttgattactgacaaccaacctgcctctctaaagagggtgtataaagggtgaaatacattagatttggctcagaaacagaatgcggtacttataaagcagaataaaggggagaacagtagtagttgatctaacccagattagacatgaataccagcatatgtttgcagagtcccacagttttgattcctcttataactttttgaggtgcaaaaggaaggtaccagaactggaatcacatgtaatcaatcagtgtgattttcccctcataccacacagccataggctgcagtgtggctgctgaagttcaattgatataaagtaaatcaggcttcaaaaagaatggtgctgtgggtacacaaggacataaagatgggaacgatagacactgaggactgcggcggggggagcgaggggagcggggagggcaagggctgaaagactatgtattgggtactatgctcacaacctggatgatgggatcattcataccacaaacctcagtatcacacaatatacccatgtaacaacctgcactctgcacatgtacccttagaatctaaaataaaagttgaaattattttttt

SEQ ID NO: 758 - protein, 331 aa, Homo sapiens; identical to SEQ ID NO: 728

SEQ ID NO: 759 - DNA, 2560 bp, Homo sapiens
tgcggggagccgagccgccggcgctcgacgcgcgcgctctcgcgagacccgcgggatcacgtgacgcccgggcgcggcgcagctcacgtgacaagcgctgccggccgcggtgtcttcttcgtgccggcgtcgcagtggccgggcctcttgcgtctggtaacgccgctgtctctaacgccagcccttggcgcccgcgccccgccaccgcagcgcccggcagtccgcggcccaaccgccgcccgcgcccccgctccccgcaccgtacccggccgcctcgcgccatggcggcccccggcagcgcccggcgacccctgctgctgctactgctgttgctgctgctcggcctcatgcattgtgcgtcagcagcaatgtttatggtgaaaaatggcaacgggaccgcgtgcataatggccaacttctctgctgccttctcagtgaactacgacaccaagagtggccctaagaacatgacctttgacctgccatcagatgccacagtggtgctcaaccgcagctcctgtggaaaagagaacacttctgaccccagtctcgtgattgcttttggaagaggacatacactcactctcaatttcacgagaaatgcaacacgttacagcgtccagctcatgagttttgtttataacttgtcagacacacaccttttccccaatgcgagctccaaagaaatcaagactgtggaatctataactgacatcagggcagatatagataaaaaatacagatgtgttagtggcacccaggtccacatgaacaacgtgaccgtaacgctccatgatgccaccatccaggcgtacctttccaacagcagcttcagcaggggagagacacgctgtgaacaagacaggccttccccaaccacagcgccccctgcgccacccagcccctcgccctcacccgtgcccaagagcccctctgtggacaagtacaacgtgagcggcaccaacgggacctgcctgctggccagcatggggctgcagctgaacctcacctatgagaggaaggacaacacgacggtgacaaggcttctcaacatcaaccccaacaagacctcggccagcgggagctgcggcgcccacctggtgactctggagctgcacagcgagggcaccaccgtcctgctcttccagttcgggatgaatgcaagttctagccggtttttcctacaaggaatccagttgaatacaattcttcctgacgccagagaccctgcctttaaagctgccaacggctccctgcgagcgctgcaggccacagtcggcaattcctacaagtgcaacgcggaggagcacgtccgtgtcacgaaggcgttttcagtcaatatattcaaagtgtgggtccaggctttcaaggtggaaggtggccagtttggctctgtggaggagtgtctgctggacgagaacagcatgctgatccccatcgctgtgggtggtgccctggcggggctggtcctcatcgtcctcatcgcctacctcgtcggcaggaagaggagtcacgcaggctaccagactatctagcctggtgcacgcaggcacagcagctgcaggggcctctgttcctttctctgggcttagggtcctgtcgaaggggaggcacactttctggcaaacgtttctcaaatctgcttcatccaatgtgaagttcatcttgcagcatttactatgcacaacagagtaactatcgaaatgacggtgttaattttgctaactgggttaaatattttgctaactggttaaacattaatatttaccaaagtaggattttgagggtgggggtgctctctctgagggggtgggggtgccgctgtctctgaggggtgggggtgccgctgtctctgaggggtgggggtgccgctctctctgagggggtgggggtgccgctttctctgagggggtgggggtgccgctctctctgagggggtgggggtgctgctctctccgaggggtggaatgccgctgtctctgaggggtgggggtgccgctctaaattggctccatatcatttgagtttagggttctggtgtttggtttcttcattctttactgcactcagatttaagccttacaaagggaaagcctctggccgtcacacgtaggacgcatgaaggtcactcgtggtgaggctgacatgctcacacattacaacagtagagagggaaaatcctaagacagaggaactccagagatgagtgtctggagcgcttcagttcagctttaaaggccaggacgggccacacgtggctggcggcctcgttccagtggcggcacgtccttgggcgtctctaatgtctgcagctcaagggctggcacttttttaaatataaaaatgggtgttatttttatttttttttgtaaagtgatttttggtcttctgttgacattcggggtgatcctgttctgcgctgtgtacaatgtgagatcggtgcgttctcctgatgttttgccgtggcttggggattgtacacgggaccagctcacgtaatgcattgcctgtaacaatgtaataaaaagcctctttcttttaaaaaaaaaaaaaaaaaaaa

SEQ ID NO: 760 - protein, 417 aa, Homo sapiens
MAAPGSARRPLLLLLLLLLLGLMHCASAAMFMVKNGNGTACIMANFSAAFSVNYDTKSGPKNMTFDLPSDATVVLNRSSCGKENTSDPSLVIAFGRGHTLTLNFTRNATRYSVQLMSFVYNLSDTHLFPNASSKEIKTVESITDIRADIDKKYRCVSGTQVHMNNVTVTLHDATIQAYLSNSSFSRGETRCEQDRPSPTTAPPAPPSPSPSPVPKSPSVDKYNVSGTNGTCLLASMGLQLNLTYERKDNTTVTRLLNINPNKTSASGSCGAHLVTLELHSEGTTVLLFQFGMNASSSRFFLQGIQLNTILPDARDPAFKAANGSLRALQATVGNSYKCNAEEHVRVTKAFSVNIFKVWVQAFKVEGGQFGSVEECLLDENSMLIPIAVGGALAGLVLIVLIAYLVGRKRSHAGYQTI

SEQ ID NO: 761 - DNA, 586 bp, Homo sapiens
agttaaaagggtgggagcgtccgggggcccatctctctcgggtggagtcttctgacagctggtgcgcctgcccgggaacatcctcctggactcaatcatggcttgtggtctggtcgccagcaacctgaatctcaaacctggagagtgccttcgagtgcgaggcgaggtggctcctgacgctaagagcttcgtgctgaacctgggcaaagacagcaacaacctgtgcctgcacttcaaccctcgcttcaacgcccacggcgacgccaacaccatcgtgtgcaacagcaaggacggcggggcctgggggaccgagcagcgggaggctgtctttcccttccagcctggaagtgttgcagaggtgtgcatcaccttcgaccaggccaacctgaccgtcaagctgccagatggatacgaattcaagttccccaaccgcctcaacctggaggccatcaactacatggcagctgacggtgacttcaagatcaaatgtgtggcctttgactgaaatcagccagcccatggcccccaataaaggcagctgcctctgctccctctgaaaaaaaaaaaaaaaaaaaaaaaaaaaaaa

SEQ ID NO: 762 - protein, 135 aa, Homo sapiens
MACGLVASNLNLKPGECLRVRGEVAPDAKSFVLNLGKDSNNLCLHFNPRFNAHGDANTIVCNSKDGGAWGTEQREAVFPFQPGSVAEVCITFDQANLTVKLPDGYEFKFPNRLNLEAINYMAADGDFKIKCVAFD

SEQ ID NO: 763 - protein, 328 aa, Homo sapiens
MLVRRGARAGPRMPRGWTALCLLSLLPSGFMSLDNNGTATPELPTQGTFSNVSTNVSYQETTTPSTLGSTSLHPVSQHGNEATTNITETTVKFTSTSVITSVYGNTNSSVQSQTSVISTVFTTPANVSTPETTLKPSLSPGNVSDLSTTSTSLATSPTKPYTSSSPILSDIKAEIKCSGIREVKLTQGICLEQNKTSSCAEFKKDRGEGLARVLCGEEQADADAGAQVCSLLLAQSEVRPQCLLLVLANRTEISSKLQLMKKHQSDLKKLGILDFTEQDVASHQSYSQKTLIALVTSGALLAVLGITGYFLMNRRSWSPTGERLELEP

SEQ ID NO: 764 - protein, 1143 aa, Homo sapiens
MYLWLKLLAFGFAFLDTEVFVTGQSPTPSPTDAYLNASETTTLSPSGSAVISTTTIATTPSKPTCDEKYANITVDYLYNKETKLFTAKLNVNENVECGNNTCTNNEVHNLTECKNASVSISHNSCTAPDKTLILDVPPGVEKFQLHDCTQVEKADTTICLKWKNIETFTCDTQNITYRFQCGNMIFDNKEIKLENLEPEHEYKCDSEILYNNHKFTNASKIIKTDFGSPGEPQIIFCRSEAAHQGVITWNPPQRSFHNFTLCYIKETEKDCLNLDKNLIKYDLQNLKPYTKYVLSLHAYIIAKVQRNGSAAMCHFTTKSAPPSQVWNMTVSMTSDNSMHVKCRPPRDRNGPHERYHLEVEAGNTLVRNESHKNCDFRVKDLQYSTDYTFKAYFHNGDYPGEPFILHHSTSYNSKALIAFLAFLIIVTSIALLVVLYKIYDLHKKRSCNLDEQQELVERDDEKQLMNVEPIHADILLETYKRKIADEGRLFLAEFQSIPRVFSKFPIKEARKPFNQNKNRYVDILPYDYNRVELSEINGDAGSNYINASYIDGFKEPRKYIAAQGPRDETVDDFWRMIWEQKATVIVMVTRCEEGNRNKCAEYWPSMEEGTRAFGDVVVKINQHKRCPDYIIQKLNIVNKKEKATGREVTHIQFTSWPDHGVPEDPHLLLKLRRRVNAFSNFFSGPIVVHCSAGVGRTGTYIGIDAMLEGLEAENKVDVYGYVVKLRRQRCLMVQVEAQYILIHQALVEYNQFGETEVNLSELHPYLHNMKKRDPPSEPSPLEAEFQRLPSYRSWRTQHIGNQEENKSKNRNSNVIPYDYNRVPLKHELEMSKESEHDSDESSDDDSDSEEPSKYINASFIMSYWKPEVMIAAQGPLKETIGDFWQMIFQRKVKVIVMLTELKHGDQEICAQYWGEGKQTYGDIEVDLKDTDKSSTYTLRVFELRHSKRKDSRTVYQYQYTNWSVEQLPAEPKELISMIQVVKQKLPQKNSSEGNKHHKSTPLLIHCRDGSQQTGIFCALLNLLESAETEEVVDIFQVVKALRKARPGMVSTFEQYQFLYDVIASTYPAQNGQVKKNNHQEDKIEFDNEVDKVKQDANCVNPLGAPEKLPEAKEQAEGSEPTSGTEGPEHSVNGPASPALNQGS

SEQ ID NO: 765 - protein, 161 aa, Homo sapiens
MNLAISIALLLTVLQVSRGQKVTSLTACLVDQSLRLDCRHENTSSSPIQYEFSLTRETKKHVLFGTVGVPEHTYRSRTNFTSKYNMKVLYLSAFTSKDEGTYTCALHHSGHSPPISSQNVTVLRDKLVKCEGISLLAQNTSWLLLLLLSLSLLQATDFMSL

SEQ ID NO: 766 - protein, 378 aa, Homo sapiens
MVLLWLTLLLIALPCLLQTKEDPNPPITNLRMKAKAQQLTWDLNRNVTDIECVKDADYSMPAVNNSYCQFGAISLCEVTNYTVRVANPPFSTWILFPENSGKPWAGAENLTCWIHDVDFLSCSWAVGPGAPADVQYDLYLNVANRRQQYECLHYKTDAQGTRIGCRFDDISRLSSGSQSSHILVRGRSAAFGIPCTDKFVVFSQIEILTPPNMTAKCNKTHSFMHWKMRSHFNRKFRYELQIQKRMQPVITEQVRDRTSFQLLNPGTYTVQIRARERVYEFLSAWSTPQRFECDQEEGANTRAWRTSLLIALGTLLALVCVFVICRRYLVMQRLFPRIPHMKDPIGDSFQNDKLVVWEAGKAGLEECLVTEVQVVQKT

SEQ ID NO: 767 - protein, 300 aa, Homo sapiens
MANCEFSPVSGDKPCCRLSRRAQLCLGVSILVLILVVVLAVVVPRWRQQWSGPGTTKRFPETVLARCVKYTEIHPEMRHVDCQSVWDAFKGAFISKHPCNITEEDYQPLMKLGTQTVPCNKILLWSRIKDLAHQFTQVQRDMFTLEDTLLGYLADDLTWCGEFNTSKINYQSCPDWRKDCSNNPVSVFWKTVSRRFAEAACDVVHVMLNGSRSKIFDKNSTFGSVEVHNLQPEKVQTLEAWVIHGGREDSRDLCQDPTIKELESIISKRNIQFSCKNIYRPDKFLQCVKNPEDSSCTSEI

SEQ ID NO: 768 - protein, 556 aa, Homo sapiens [sequence omitted]

SEQ ID NO: 769 - protein, 750 aa, Homo sapiens; identical to SEQ ID NO: 105

SEQ ID NO: 770 - protein, 364 aa, Homo sapiens
MPLLLLLPLLWAGALAMDPNFWLQVQESVTVQEGLCVLVPCTFFHPIPYYDKNSPVHGYWFREGAIISRDSPVATNKLDQEVQEETQGRFRLLGDPSRNNCSLSIVDARRRDNGSYFFRMERGSTKYSYKSPQLSVHVTDLTHRPKILIPGTLEPGHSKNLTCSVSWACEQGTPPIFSWLSAAPTSLGPRTTHSSVLIITPRPQDHGTNLTCQVKFAGAGVTTERTIQLNVTYVPQNPTTGIFPGDGSGKQETRAGVVHGAIGGAGVTALLALCLCLIFFIVKTHRRKAARTAVGRNDTHPTTGSASPKHQKKSKLHGPTETSSCSGAAPTVEMDEELHYASLNFHGMNPSKDTSTEYSEVRTQ

SEQ ID NO: 771 - protein, 1304 aa, Homo sapiens
MYLWLKLLAFGFAFLDTEVFVTGQSPTPSPTGLTTAKMPSVPLSSDPLPTHTTAFSPASTFERENDFSETTTSLSPDNTSTQVSPDSLDNASAFNTTGVSSVQTPHLPTHADSQTPSAGTDTQTFSGSAANAKLNPTPGSNAISDVPGERSTASTFPTDPVSPLTTTLSLAHHSSAALPARTSNTTITANTSDAYLNASETTTLSPSGSAVISTTTIATTPSKPTCDEKYANITVDYLYNKETKLFTAKLNVNENVECGNNTCTNNEVHNLTECKNASVSISHNSCTAPDKTLILDVPPGVEKFQLHDCTQVEKADTTICLKWKNIETFTCDTQNITYRFQCGNMIFDNKEIKLENLEPEHEYKCDSEILYNNHKFTNASKIIKTDFGSPGEPQIIFCRSEAAHQGVITWNPPQRSFHNFTLCYIKETEKDCLNLDKNLIKYDLQNLKPYTKYVLSLHAYIIAKVQRNGSAAMCHFTTKSAPPSQVWNMTVSMTSDNSMHVKCRPPRDRNGPHERYHLEVEAGNTLVRNESHKNCDFRVKDLQYSTDYTFKAYFHNGDYPGEPFILHHSTSYNSKALIAFLAFLIIVTSIALLVVLYKIYDLHKKRSCNLDEQQELVERDDEKQLMNVEPIHADILLETYKRKIADEGRLFLAEFQSIPRVFSKFPIKEARKPFNQNKNRYVDILPYDYNRVELSEINGDAGSNYINASYIDGFKEPRKYIAAQGPRDETVDDFWRMIWEQKATVIVMVTRCEEGNRNKCAEYWPSMEEGTRAFGDVVVKINQHKRCPDYIIQKLNIVNKKEKATGREVTHIQFTSWPDHGVPEDPHLLLKLRRRVNAFSNFFSGPIVVHCSAGVGRTGTYIGIDAMLEGLEAENKVDVYGYVVKLRRQRCLMVQVEAQYILIHQALVEYNQFGETEVNLSELHPYLHNMKKRDPPSEPSPLEAEFQRLPSYRSWRTQHIGNQEENKSKNRNSNVIPYDYNRVPLKHELEMSKESEHDSDESSDDDSDSEEPSKYINASFIMSYWKPEVMIAAQGPLKETIGDFWQMIFQRKVKVIVMLTELKHGDQEICAQYWGEGKQTYGDIEVDLKDTDKSSTYTLRVFELRHSKRKDSRTVYQYQYTNWSVEQLPAEPKELISMIQVVKQKLPQKNSSEGNKHHKSTPLLIHCRDGSQQTGIFCALLNLLESAETEEVVDIFQVVKALRKARPGMVSTFEQYQFLYDVIASTYPAQNGQVKKNNHQEDKIEFDNEVDKVKQDANCVNPLGAPEKLPEAKEQAEGSEPTSGTEGPEHSVNGPASPALNQGS

SEQ ID NO: 772 - DNA, 1158 bp, Homo sapiens
atgctggtccgcaggggcgcgcgcgcagggcccaggatgccgcggggctggaccgcgctttgcttgctgagtttgctgccttctgggttcatgagtcttgacaacaacggtactgctaccccagagttacctacccagggaacattttcaaatgtttctacaaatgtatcctaccaagaaactacaacacctagtacccttggaagtaccagcctgcaccctgtgtctcaacatggcaatgaggccacaacaaacatcacagaaacgacagtcaaattcacatctacctctgtgataacctcagtttatggaaacacaaactcttctgtccagtcacagacctctgtaatcagcacagtgttcaccaccccagccaacgtttcaactccagagacaaccttgaagcctagcctgtcacctggaaatgtttcagacctttcaaccactagcactagccttgcaacatctcccactaaaccctatacatcatcttctcctatcctaagtgacatcaaggcagaaatcaaatgttcaggcatcagagaagtgaaattgactcagggcatctgcctggagcaaaataagacctccagctgtgcggagtttaagaaggacaggggagagggcctggcccgagtgctgtgtggggaggagcaggctgatgctgatgctggggcccaggtatgctccctgctccttgcccagtctgaggtgaggcctcagtgtctactgctggtcttggccaacagaacagaaatttccagcaaactccaacttatgaaaaagcaccaatctgacctgaaaaagctggggatcctagatttcactgagcaagatgttgcaagccaccagagctattcccaaaagaccctgattgcactggtcacctcgggagccctgctggctgtcttgggcatcactggctatttcctgatgaatcgccgcagctggagccccacaggagaaaggctgggcgaagacccttattacacggaaaacggtggaggccagggctatagctcaggacctgggacctcccctgaggctcagggaaaggccagtgtgaaccgaggggctcaggaaaacgggaccggccaggccacctccagaaacggccattcagcaagacaacacgtggtggctgataccgaattgtga

SEQ ID NO: 773 - DNA, 3915 bp, Homo sapiens
atgtatttgtggcttaaactcttggcatttggctttgcctttctggacacagaagtatttgtgacagggcaaagcccaacaccttcccccactggattgactacagcaaagatgcccagtgttccactttcaagtgaccccttacctactcacaccactgcattctcacccgcaagcacctttgaaagagaaaatgacttctcagagaccacaacttctcttagtccagacaatacttccacccaagtatccccggactctttggataatgctagtgcttttaataccacaggtgtttcatcagtacagacgcctcaccttcccacgcacgcagactcgcagacgccctctgctggaactgacacgcagacattcagcggctccgccgccaatgcaaaactcaaccctaccccaggcagcaatgctatctcagatgtcccaggagagaggagtacagccagcacctttcctacagacccagtttccccattgacaaccaccctcagccttgcacaccacagctctgctgccttacctgcacgcacctccaacaccaccatcacagcgaacacctcagatgcctaccttaatgcctctgaaacaaccactctgagcccttctggaagcgctgtcatttcaaccacaacaatagctactactccatctaagccaacatgtgatgaaaaatatgcaaacatcactgtggattacttatataacaaggaaactaaattatttacagcaaagctaaatgttaatgagaatgtggaatgtggaaacaatacttgcacaaacaatgaggtgcataaccttacagaatgtaaaaatgcgtctgtttccatatctcataattcatgtactgctcctgataagacattaatattagatgtgccaccaggggttgaaaagtttcagttacatgattgtacacaagttgaaaaagcagatactactatttgtttaaaatggaaaaatattgaaacctttacttgtgatacacagaatattacctacagatttcagtgtggtaatatgatatttgataataaagaaattaaattagaaaaccttgaacccgaacatgagtataagtgtgactcagaaatactctataataaccacaagtttactaacgcaagtaaaattattaaaacagattttgggagtccaggagagcctcagattattttttgtagaagtgaagctgcacatcaaggagtaattacctggaatccccctcaaagatcatttcataattttaccctctgttatataaaagagacagaaaaagattgcctcaatctggataaaaacctgatcaaatatgatttgcaaaatttaaaaccttatacgaaatatgttttatcattacatgcctacatcattgcaaaagtgcaacgtaatggaagtgctgcaatgtgtcatttcacaactaaaagtgctcctccaagccaggtctggaacatgactgtctccatgacatcagataatagtatgcatgtcaagtgtaggcctcccagggaccgtaatggcccccatgaacgttaccatttggaagttgaagctggaaatactctggttagaaatgagtcgcataagaattgcgatttccgtgtaaaagatcttcaatattcaacagactacacttttaaggcctattttcacaatggagactatcctggagaaccctttattttacatcattcaacatcttataattctaaggcactgatagcatttctggcatttctgattattgtgacatcaatagccctgcttgttgttctctacaaaatctatgatctacataagaaaagatcctgcaatttagatgaacagcaggagcttgttgaaagggatgatgaaaaacaactgatgaatgtggagccaatccatgcagatattttgttggaaacttataagaggaagattgctgatgaaggaagactttttctggctgaatttcagagcatcccgcgggtgttcagcaagtttcctataaaggaagctcgaaagccctttaaccagaataaaaaccgttatgttgacattcttccttatgattataaccgtgttgaactctctgagataaacggagatgcagggtcaaactacataaatgccagctatattgatggtttcaaagaacccaggaaatacattgctgcacaaggtcccagggatgaaactgttgatgatttctggaggatgatttgggaacagaaagccacagttattgtcatggtcactcgatgtgaagaaggaaacaggaacaagtgtgcagaatactggccgtcaatggaagagggcactcgggcttttggagatgttgttgtaaagatcaaccagcacaaaagatgtccagattacatcattcagaaattgaacattgtaaataaaaaagaaaaagcaactggaagagaggtgactcacattcagttcaccagctggccagaccacggggtgcctgaggatcctcacttgctcctcaaactgagaaggagagtgaatgccttcagcaatttcttcagtggtcccattgtggtgcactgcagtgctggtgttgggcgcacaggaacctatatcggaattgatgccatgctagaaggcctggaagccgagaacaaagtggatgtttatggttatgttgtcaagctaaggcgacagagatgcctgatggttcaagtagaggcccagtacatcttgatccatcaggctttggtggaatacaatcagtttggagaaacagaagtgaatttgtctgaattacatccatatctacataacatgaagaaaagggatccacccagtgagccgtctccactagaggctgaattccagagacttccttcatataggagctggaggacacagcacattggaaatcaagaagaaaataaaagtaaaaacaggaattctaatgtcatcccatatgactataacagagtgccacttaaacatgagctggaaatgagtaaagagagtgagcatgattcagatgaatcctctgatgatgacagtgattcagaggaaccaagcaaatacatcaatgcatcttttataatgagctactggaaacctgaagtgatgattgctgctcagggaccactgaaggagaccattggtgacttttggcagatgatcttccaaagaaaagtcaaagttattgttatgctgacagaactgaaacatggagaccaggaaatctgtgctcagtactggggagaaggaaagcaaacatatggagatattgaagttgacctgaaagacacagacaaatcttcaacttatacccttcgtgtctttgaactgagacattccaagaggaaagactctcgaactgtgtaccagtaccaatatacaaactggagtgtggagcagcttcctgcagaacccaaggaattaatctctatgattcaggtcgtcaaacaaaaacttccccagaagaattcctctgaagggaacaagcatcacaagagtacacctctactcattcactgcagggatggatctcagcaaacgggaatattttgtgctttgttaaatctcttagaaagtgcggaaacagaagaggtagtggatatttttcaagtggtaaaagctctacgcaaagctaggccaggcatggtttccacattcgagcaatatcaattcctatatgacgtcattgccagcacctaccctgctcagaatggacaagtaaagaaaaacaaccatcaagaagataaaattgaatttgataatgaagtggacaaagtaaagcaggatgctaattgtgttaatccacttggtgccccagaaaagctccctgaagcaaaggaacaggctgaaggttctgaacccacgagtggcactgaggggccagaacattctgtcaatggtcctgcaagtccagctttaaatcaaggttcatag

SEQ ID NO: 774 - DNA, 486 bp, Homo sapiens
atgaacctggccatcagcatcgctctcctgctaacagtcttgcaggtctcccgagggcagaaggtgaccagcctaacggcctgcctagtggaccagagccttcgtctggactgccgccatgagaataccagcagttcacccatccagtacgagttcagcctgacccgtgagacaaagaagcacgtgctctttggcactgtgggggtgcctgagcacacataccgctcccgaaccaacttcaccagcaaatacaacatgaaggtcctctacttatccgccttcactagcaaggacgagggcacctacacgtgtgcactccaccactctggccattccccacccatctcctcccagaacgtcacagtgctcagagacaaactggtcaagtgtgagggcatcagcctgctggctcagaacacctcgtggctgctgctgctcctgctctccctctccctcctccaggccacggatttcatgtccctgtga

SEQ ID NO: 775 - DNA, 1137 bp, Homo sapiens
atggtcctcctttggctcacgctgctcctgatcgccctgccctgtctcctgcaaacgaaggaagatccaaacccaccaatcacgaacctaaggatgaaagcaaaggctcagcagttgacctgggaccttaacagaaatgtgaccgatatcgagtgtgttaaagacgccgactattctatgccggcagtgaacaatagctattgccagtttggagcaatttccttatgtgaagtgaccaactacaccgtccgagtggccaacccaccattctccacgtggatcctcttccctgagaacagtgggaagccttgggcaggtgcggagaatctgacctgctggattcatgacgtggatttcttgagctgcagctgggcggtaggcccgggggcccccgcggacgtccagtacgacctgtacttgaacgttgccaacaggcgtcaacagtacgagtgtcttcactacaaaacggatgctcagggaacacgtatcgggtgtcgtttcgatgacatctctcgactctccagcggttctcaaagttcccacatcctggtgcggggcaggagcgcagccttcggtatcccctgcacagataagtttgtcgtcttttcacagattgagatattaactccacccaacatgactgcaaagtgtaataagacacattcctttatgcactggaaaatgagaagtcatttcaatcgcaaatttcgctatgagcttcagatacaaaagagaatgcagcctgtaatcacagaacaggtcagagacagaacctccttccagctactcaatcctggaacgtacacagtacaaataagagcccgggaaagagtgtatgaattcttgagcgcctggagcaccccccagcgcttcgagtgcgaccaggaggagggcgcaaacacacgtgcctggcggacgtcgctgctgatcgcgctggggacgctgctggccctggtctgtgtcttcgtgatctgcagaaggtatctggtgatgcagagactctttccccgcatccctcacatgaaagaccccatcggtgacagcttccaaaacgacaagctggtggtctgggaggcgggcaaagccggcctggaggagtgtctggtgactgaagtacaggtcgtgcagaaaacttga

SEQ ID NO: 776 - DNA, 903 bp, Homo sapiens
atggccaactgcgagttcagcccggtgtccggggacaaaccctgctgccggctctctaggagagcccaactctgtcttggcgtcagtatcctggtcctgatcctcgtcgtggtgctcgcggtggtcgtcccgaggtggcgccagcagtggagcggtccgggcaccaccaagcgctttcccgagaccgtcctggcgcgatgcgtcaagtacactgaaattcatcctgagatgagacatgtagactgccaaagtgtatgggatgctttcaagggtgcatttatttcaaaacatccttgcaacattactgaagaagactatcagccactaatgaagttgggaactcagaccgtaccttgcaacaagattcttctttggagcagaataaaagatctggcccatcagttcacacaggtccagcgggacatgttcaccctggaggacacgctgctaggctaccttgctgatgacctcacatggtgtggtgaattcaacacttccaaaataaactatcaatcttgcccagactggagaaaggactgcagcaacaaccctgtttcagtattctggaaaacggtttcccgcaggtttgcagaagctgcctgtgatgtggtccatgtgatgctcaatggatcccgcagtaaaatctttgacaaaaacagcacttttgggagtgtggaagtccataatttgcaaccagagaaggttcagacactagaggcctgggtgatacatggtggaagagaagattccagagacttatgccaggatcccaccataaaagagctggaatcgattataagcaaaaggaatattcaattttcctgcaagaatatctacagacctgacaagtttcttcagtgtgtgaaaaatcctgaggattcatcttgcacatctgagatctga

SEQ ID NO: 777 - DNA, 1671 bp, Homo sapiens
atgccacctcctcgcctcctcttcttcctcctcttcctcacccccatggaagtcaggcccgaggaacctctagtggtgaaggtggaagagggagataacgctgtgctgcagtgcctcaaggggacctcagatggccccactcagcagctgacctggtctcgggagtccccgcttaaacccttcttaaaactcagcctggggctgccaggcctgggaatccacatgaggcccctggccatctggcttttcatcttcaacgtctctcaacagatggggggcttctacctgtgccagccggggcccccctctgagaaggcctggcagcctggctggacagtcaatgtggagggcagcggggagctgttccggtggaatgtttcggacctaggtggcctgggctgtggcctgaagaacaggtcctcagagggccccagctccccttccgggaagctcatgagccccaagctgtatgtgtgggccaaagaccgccctgagatctgggagggagagcctccgtgtctcccaccgagggacagcctgaaccagagcctcagccaggacctcaccatggcccctggctccacactctggctgtcctgtggggtaccccctgactctgtgtccaggggccccctctcctggacccatgtgcaccccaaggggcctaagtcattgctgagcctagagctgaaggacgatcgcccggccagagatatgtgggtaatggagacgggtctgttgttgccccgggccacagctcaagacgctggaaagtattattgtcaccgtggcaacctgaccatgtcattccacctggagatcactgctcggccagtactatggcactggctgctgaggactggtggctggaaggtctcagctgtgactttggcttatctgatcttctgcctgtgttcccttgtgggcattcttcatcttcaaagagccctggtcctgaggaggaaaagaaagcgaatgactgaccccaccaggagattcttcaaagtgacgcctcccccaggaagcgggccccagaaccagtacgggaacgtgctgtctctccccacacccacctcaggcctcggacgcgcccagcgttgggccgcaggcctggggggcactgccccgtcttatggaaacccgagcagcgacgtccaggcggatggagccttggggtcccggagcccgccgggagtgggcccagaagaagaggaaggggagggctatgaggaacctgacagtgaggaggactccgagttctatgagaacgactccaaccttgggcaggaccagctctcccaggatggcagcggctacgagaaccctgaggatgagcccctgggtcctgaggatgaagactccttctccaacgctgagtcttatgagaacgaggatgaagagctgacccagccggtcgccaggacaatggacttcctgagccctcatgggtcagcctgggaccccagccgggaagcaacctccctggggtcccagtcctatgaggatatgagaggaatcctgtatgcagccccccagctccgctccattcggggccagcctggacccaatcatgaggaagatgcagactcttatgagaacatggataatcccgatgggccagacccagcctggggaggagggggccgcatgggcacctggagcaccaggtga

SEQ ID NO: 778 - DNA, 2253 bp, Homo sapiens
atgggcaagtcagaaagtcagatggatataactgatatcaacactccaaagccaaagaagaaacagcgatggactccactggagatcagcctctcggtccttgtcctgctcctcaccatcatagctgtgacaatgatcgcactctatgcaacctacgatgatggtatttgcaagtcatcagactgcataaaatcagctgctcgactgatccaaaacatggatgccaccactgagccttgtacagactttttcaaatatgcttgcggaggctggttgaaacgtaatgtcattcccgagaccagctcccgttacggcaactttgacattttaagagatgaactagaagtcgttttgaaagatgtccttcaagaacccaaaactgaagatatagtagcagtgcagaaagcaaaagcattgtacaggtcttgtataaatgaatctgctattgatagcagaggtggagaacctctactcaaactgttaccagacatatatgggtggccagtagcaacagaaaactgggagcaaaaatatggtgcttcttggacagctgaaaaagctattgcacaactgaattctaaatatgggaaaaaagtccttattaatttgtttgttggcactgatgataagaattctgtgaatcatgtaattcatattgaccaacctcgacttggcctcccttctagagattactatgaatgcactggaatctataaagaggcttgtacagcatatgtggattttatgatttctgtggccagattgattcgtcaggaagaaagattgcccatcgatgaaaaccagcttgctttggaaatgaataaagttatggaattggaaaaagaaattgccaatgctacggctaaacctgaagatcgaaatgatccaatgcttctgtataacaagatgacattggcccagatccaaaataacttttcactagagatcaatgggaagccattcagctggttgaatttcacaaatgaaatcatgtcaactgtgaatattagtattacaaatgaggaagatgtggttgtttatgctccagaatatttaaccaaacttaagcccattcttaccaaatattctgccagagatcttcaaaatttaatgtcctggagattcataatggatcttgtaagcagcctcagccgaacctacaaggagtccagaaatgctttccgcaaggccctttatggtacaacctcagaaacagcaacttggagacgttgtgcaaactatgtcaatgggaatatggaaaatgctgtggggaggctttatgtggaagcagcatttgctggagagagtaaacatgtggtcgaggatttgattgcacagatccgagaagtttttattcagactttagatgacctcacttggatggatgccgagacaaaaaagagagctgaagaaaaggccttagcaattaaagaaaggatcggctatcctgatgacattgtttcaaatgataacaaactgaataatgagtacctcgagttgaactacaaagaagatgaatacttcgagaacataattcaaaatttgaaattcagccaaagtaaacaactgaagaagctccgagaaaaggtggacaaagatgagtggataagtggagcagctgtagtcaatgcattttactcttcaggaagaaatcagatagtcttcccagccggcattctgcagccccccttctttagtgcccagcagtccaactcattgaactatgggggcatcggcatggtcataggacacgaaatcacccatggcttcgatgacaatggcagaaactttaacaaagatggagacctcgttgactggtggactcaacagtctgcaagtaactttaaggagcaatcccagtgcatggtgtatcagtatggaaacttttcctgggacctggcaggtggacagcaccttaatggaattaatacactgggagaaaacattgctgataatggaggtcttggtcaagcatacagagcctatcagaattatattaaaaagaatggcgaagaaaaattacttcctggacttgacctaaatcacaaacaactatttttcttgaactttgcacaggtgtggtgtggaacctataggccagagtatgcggttaactccattaaaacagatgtgcacagtccaggcaatttcaggattattgggactttgcagaactctgcagagttttcagaagcctttcactgccgcaagaattcatacatgaatccagaaaagaagtgccgggtttggtga

SEQ ID NO: 779 - DNA, 1095 bp, Homo sapiens
atgccgctgctgctactgctgcccctgctgtgggcaggggccctggctatggatccaaatttctggctgcaagtgcaggagtcagtgacggtacaggagggtttgtgcgtcctcgtgccctgcactttcttccatcccataccctactacgacaagaactccccagttcatggttactggttccgggaaggagccattatatccagggactctccagtggccacaaacaagctagatcaagaagtacaggaggagactcagggcagattccgcctccttggggatcccagtaggaacaactgctccctgagcatcgtagacgccaggaggagggataatggttcatacttctttcggatggagagaggaagtaccaaatacagttacaaatctccccagctctctgtgcatgtgacagacttgacccacaggcccaaaatcctcatccctggcactctagaacccggccactccaaaaacctgacctgctctgtgtcctgggcctgtgagcagggaacacccccgatcttctcctggttgtcagctgcccccacctccctgggccccaggactactcactcctcggtgctcataatcaccccacggccccaggaccacggcaccaacctgacctgtcaggtgaagttcgctggagctggtgtgactacggagagaaccatccagctcaacgtcacctatgttccacagaacccaacaactggtatctttccaggagatggctcagggaaacaagagaccagagcaggagtggttcatggggccattggaggagctggtgttacagccctgctcgctctttgtctctgcctcatcttcttcatagtgaagacccacaggaggaaagcagccaggacagcagtgggcaggaatgacacccaccctaccacagggtcagcctccccgaaacaccagaagaagtccaagttacatggccccactgaaacctcaagctgttcaggtgccgcccctactgtggagatggatgaggagctgcattatgcttccctcaactttcatgggatgaatccttccaaggacacctccaccgaatactcagaggtcaggacccagtga

SEQ ID NO: 780 - DNA, 3921 bp, Homo sapiens
atgaccatgtatttgtggcttaaactcttggcatttggctttgcctttctggacacagaagtatttgtgacagggcaaagcccaacaccttcccccactggattgactacagcaaagatgcccagtgttccactttcaagtgaccccttacctactcacaccactgcattctcacccgcaagcacctttgaaagagaaaatgacttctcagagaccacaacttctcttagtccagacaatacttccacccaagtatccccggactctttggataatgctagtgcttttaataccacaggtgtttcatcagtacagacgcctcaccttcccacgcacgcagactcgcagacgccctctgctggaactgacacgcagacattcagcggctccgccgccaatgcaaaactcaaccctaccccaggcagcaatgctatctcagatgtcccaggagagaggagtacagccagcacctttcctacagacccagtttccccattgacaaccaccctcagccttgcacaccacagctctgctgccttacctgcacgcacctccaacaccaccatcacagcgaacacctcagatgcctaccttaatgcctctgaaacaaccactctgagcccttctggaagcgctgtcatttcaaccacaacaatagctactactccatctaagccaacatgtgatgaaaaatatgcaaacatcactgtggattacttatataacaaggaaactaaattatttacagcaaagctaaatgttaatgagaatgtggaatgtggaaacaatacttgcacaaacaatgaggtgcataaccttacagaatgtaaaaatgcgtctgtttccatatctcataattcatgtactgctcctgataagacattaatattagatgtgccaccaggggttgaaaagtttcagttacatgattgtacacaagttgaaaaagcagatactactatttgtttaaaatggaaaaatattgaaacctttacttgtgatacacagaatattacctacagatttcagtgtggtaatatgatatttgataataaagaaattaaattagaaaaccttgaacccgaacatgagtataagtgtgactcagaaatactctataataaccacaagtttactaacgcaagtaaaattattaaaacagattttgggagtccaggagagcctcagattattttttgtagaagtgaagctgcacatcaaggagtaattacctggaatccccctcaaagatcatttcataattttaccctctgttatataaaagagacagaaaaagattgcctcaatctggataaaaacctgatcaaatatgatttgcaaaatttaaaaccttatacgaaatatgttttatcattacatgcctacatcattgcaaaagtgcaacgtaatggaagtgctgcaatgtgtcatttcacaactaaaagtgctcctccaagccaggtctggaacatgactgtctccatgacatcagataatagtatgcatgtcaagtgtaggcctcccagggaccgtaatggcccccatgaacgttaccatttggaagttgaagctggaaatactctggttagaaatgagtcgcataagaattgcgatttccgtgtaaaagatcttcaatattcaacagactacacttttaaggcctattttcacaatggagactatcctggagaaccctttattttacatcattcaacatcttataattctaaggcactgatagcatttctggcatttctgattattgtgacatcaatagccctgcttgttgttctctacaaaatctatgatctacataagaaaagatcctgcaatttagatgaacagcaggagcttgttgaaagggatgatgaaaaacaactgatgaatgtggagccaatccatgcagatattttgttggaaacttataagaggaagattgctgatgaaggaagactttttctggctgaatttcagagcatcccgcgggtgttcagcaagtttcctataaaggaagctcgaaagccctttaaccagaataaaaaccgttatgttgacattcttccttatgattataaccgtgttgaactctctgagataaacggagatgcagggtcaaactacataaatgccagctatattgatggtttcaaagaacccaggaaatacattgctgcacaaggtcccagggatgaaactgttgatgatttctggaggatgatttgggaacagaaagccacagttattgtcatggtcactcgatgtgaagaaggaaacaggaacaagtgtgcagaatactggccgtcaatggaagagggcactcgggcttttggagatgttgttgtaaagatcaaccagcacaaaagatgtccagattacatcattcagaaattgaacattgtaaataaaaaagaaaaagcaactggaagagaggtgactcacattcagttcaccagctggccagaccacggggtgcctgaggatcctcacttgctcctcaaactgagaaggagagtgaatgccttcagcaatttcttcagtggtcccattgtggtgcactgcagtgctggtgttgggcgcacaggaacctatatcggaattgatgccatgctagaaggcctggaagccgagaacaaagtggatgtttatggttatgttgtcaagctaaggcgacagagatgcctgatggttcaagtagaggcccagtacatcttgatccatcaggctttggtggaatacaatcagtttggagaaacagaagtgaatttgtctgaattacatccatatctacataacatgaagaaaagggatccacccagtgagccgtctccactagaggctgaattccagagacttccttcatataggagctggaggacacagcacattggaaatcaagaagaaaataaaagtaaaaacaggaattctaatgtcatcccatatgactataacagagtgccacttaaacatgagctggaaatgagtaaagagagtgagcatgattcagatgaatcctctgatgatgacagtgattcagaggaaccaagcaaatacatcaatgcatcttttataatgagctactggaaacctgaagtgatgattgctgctcagggaccactgaaggagaccattggtgacttttggcagatgatcttccaaagaaaagtcaaagttattgttatgctgacagaactgaaacatggagaccaggaaatctgtgctcagtactggggagaaggaaagcaaacatatggagatattgaagttgacctgaaagacacagacaaatcttcaacttatacccttcgtgtctttgaactgagacattccaagaggaaagactctcgaactgtgtaccagtaccaatatacaaactggagtgtggagcagcttcctgcagaacccaaggaattaatctctatgattcaggtcgtcaaacaaaaacttccccagaagaattcctctgaagggaacaagcatcacaagagtacacctctactcattcactgcagggatggatctcagcaaacgggaatattttgtgctttgttaaatctcttagaaagtgcggaaacagaagaggtagtggatatttttcaagtggtaaaagctctacgcaaagctaggccaggcatggtttccacattcgagcaatatcaattcctatatgacgtcattgccagcacctaccctgctcagaatggacaagtaaagaaaaacaaccatcaagaagataaaattgaatttgataatgaagtggacaaagtaaagcaggatgctaattgtgttaatccacttggtgccccagaaaagctccctgaagcaaaggaacaggctgaaggttctgaacccacgagtggcactgaggggccagaacattctgtcaatggtcctgcaagtccagctttaaatcaaggttcatag
